(19) United States
(12) Patent Application Publication
(10) Pub. No.: US 2009/0239756 A1
(43) Pub. Date: Sep. 24, 2009

(54) PREDICTORS FOR METASTASIS OF BREAST CANCER

(75) Inventors: Torben Kruse, Svendborg (DK); Mads Thomassen, Gudbjerg (DK); Qihua Tan, Odense C (DK)

Correspondence Address: MERCHANT & GOULD PC, P.O. BOX 2903, MINNEAPOLIS, MN, 55402-0903, US

(73) Assignee: Syddansk Universitet, Odense M (DK)

(21) Appl. No.: 12/396,906

(22) Filed: Mar. 3, 2009

Related U.S. Application Data
(60) Provisional application No. 61/037,397, filed on Mar. 18, 2008.

(51) Int. Cl. C40B 30/00; C40B 40/06

(52) U.S. Cl. 506/7; 506/16

(57) ABSTRACT

There is provided a gene expression pattern which is clinically relevant to metastasizing breast cancer. In particular, the identity of genes that are correlated with patient survival and breast cancer recurrence are provided. The gene expression profile, whether embodied in nucleic acid expression, protein expression, or other expression formats, may be used to predict survival of subjects afflicted with breast cancer and the likelihood of breast cancer recurrence. The invention thus provides for the use of a gene expression pattern (or profile or “signature”) which correlates with (and thus able to discriminate between) patients with good or poor survival outcomes.

[0001] This application claims benefit of Ser. No. 61/037397, filed Mar. 18, 2008 in the United States and which application is incorporated herein by reference. A claim of priority to the extent appropriate is made.

### FIELD OF THE INVENTION

[0002] The invention relates to the identification and use of a gene expression profile with clinical relevance to breast cancer. In particular, the invention provides the identities of genes that are correlated with patient survival and breast cancer recurrence. The gene expression profiles, whether embodied in nucleic acid expression, protein expression, or other expression formats, may be used to predict the survival of subjects afflicted with breast cancer and to predict breast cancer recurrence. The profiles may also be used in the study and/or diagnosis of breast cancer cells and tissue, including the grading of invasive breast cancer, as well as for the study and/or determination of prognosis of a patient. When used for diagnosis or prognosis, the profiles are used to determine the treatment of breast cancer based upon the likelihood of life expectancy and recurrence.

### BACKGROUND OF THE INVENTION

[0003] Breast tumors can be either benign or malignant. Benign tumors are not cancerous, they do not spread to other parts of the body, and are not a threat to life. They can usually be removed, and in most cases, do not come back. Malignant tumors are cancerous, and can invade and damage nearby tissues and organs. Malignant tumor cells may metastasize, entering the bloodstream or lymphatic system. When breast cancer cells metastasize outside the breast, they are often found in the lymph nodes under the arm (axillary lymph nodes). If the cancer has reached these nodes, it means that cancer cells may have spread to other lymph nodes or other organs, such as bones, liver, or lungs.

[0004] Major and intensive research has been focused on early detection, treatment and prevention. This has included an emphasis on determining the presence of precancerous or cancerous ductal epithelial cells. These cells are analyzed, for example, for cell morphology, for protein markers, for nucleic acid markers, for chromosomal abnormalities, for biochemical markers, and for other characteristic changes that would signal the presence of cancerous or precancerous cells. This has led to various molecular alterations that have been reported in breast cancer, few of which have been well characterized in human clinical breast specimens. Molecular alterations include presence/absence of estrogen and progesterone steroid receptors, HER-2 expression/amplification (Mark H E, et al. HER-2/neu gene amplification in stages I-IV breast cancer detected by fluorescent in situ hybridization. Genet Med; 1 (3):98-103 1999), Ki-67 (an antigen that is present in all stages of the cell cycle except G0 and used as a marker for tumor cell proliferation, and prognostic markers (including oncogenes, tumor suppressor genes, and angiogenesis markers).

[0005] Characterized by simultaneous profiling for the transcriptional activities of thousands of mRNA species in a human tissue, the DNA microarray technology represents an important high-throughput platform for analyzing and understanding human diseases. The tremendous potential provided by the new technology is serving us not only as a molecular tool for investigating disease mechanisms but also for classification and clinical outcome prediction (Dudda-Subramanya et al. 2003). Application of the technology in clinical oncology is demonstrating it as a powerful tool for refining diagnosis and improving prognostic prediction accuracy of cancer patients (Pusztai et al. 2003). Bioinformatics and biostatistics play important roles in such practices in establishing gene expression signatures or prognostic markers and in building up efficient classifiers (Asyali et al. 2006). Among the major issues in gene expression profile classification, feature selection is an important and necessary step in achieving and creating good classification rules given the high dimensionality of microarray data. There are various approaches for feature selection in the literature among which one common approach is the univariate selection scheme for selecting only genes with the highest statistical significance. Such an approach can be inadequate because (1) it tends to include elements that contribute highly redundant information and (2) it ignores the co-regulatory network in gene function. As a result, the univariate approach does not necessarily guarantee a best classifier (Ein-Dor et al. 2005; Baker and Kramer, 2006).

[0006] Tibshirani et al. (2002) proposed a Nearest Shrunken Centroids (NSC) method for both feature selection and tumor classification. In NSC, weak elements of the class centroids are shrunk or deleted via soft-thresholding to identify genes that best characterize each class. The method implemented in an R package (PAM, Prediction Analysis of Microarrays) performs well in identifying subsets of genes that can be used for classification and prediction. Although different feature selection methods have been reported for tumor classification (Inza et al. 2004), there has been no method specifically proposed for paired microarray experiments.

[0007] van's Veer et al. (Nature 415:530-536, 2002) describe gene expression profiling of clinical outcome in breast cancer. They identified genes expressed in breast cancer tumors, the expression levels of which correlated either with patients afflicted with distant metastases within 5 years or with patients that remained metastasis-free after at least 5 years.

[0008] Ramaswamy et al. (Nature Genetics 33:49-54, 2003) describe the identification of a molecular signature of metastasis in primary solid tumors. The genes of the signature were identified based on gene expression profiles of 12 metastatic adenocarcinoma nodules of diverse origin (lung, breast, prostate, colorectal, uterus) compared to expression profiles of 64 primary adenocarcinomas representing the same spectrum of tumor types from different individuals. A 128 gene set was identified.

[0009] Both of the above described approaches, however, utilize heterogeneous populations of cells found in a tumor sample to obtain information on gene expression patterns. The use of such populations may result in the inclusion or exclusion of multiple genes that are differentially expressed in cancer cells. The gene expression patterns observed by the above described approaches may thus provide little confidence that the differences in gene expression are meaningfully associated with breast cancer recurrence or survival.

[0010] As explained in more detail below the present invention is based on the increased expression of the genes FLJ20354, IMAGE:4081483, UBE2R2, ZNF533, and DTL. So far no prior art disclosure has envisaged that this gene profile is useful for the prediction of risk of metastasis.

[0011] WO06037485A2 discloses that 84 human genes, including FLJ20354, are differentially expressed in neoplastic tissue of breast cancer patients responding well to adjuvant CMF chemotherapy as compared to patients not responding well to adjuvant CMF chemotherapy. The document teaches that elevated or decreased levels of expression in one or several of the 84 genes at the time of tumor surgery or prior to any intervention (e.g. punch biopsy sample) was found to provide valuable information on whether or not a patient is likely to develop distant metastasis despite the given mode of chemotherapy.

[0012] WO05005601A2 discloses compositions and methods for treating, characterizing, and diagnosing cancer, including breast cancer. In particular, the document discloses gene expression profiles associated with solid tumor stem cells, as well as novel stem cell cancer markers useful for the diagnosis, characterization, and treatment of solid tumor stem cells. Although the document discloses gene expression profiles, including FLJ20354, it does not envisage prediction of metastasis based on the 5 differentially expressed genes of the present invention. Accordingly, the present invention also appears to be patentable over this prior art document.

[0013] WO04111603A2 discloses sets of genes, including FLJ20354, the expression of which is important in the prognosis of cancer. In particular, the document provides gene expression information useful for predicting whether cancer patients are likely to have a beneficial treatment response to chemotherapy. While this prior art document does not explicitly disclose that FLJ20354 may be used to predict the risk of metastasis it categorizes the gene as important in relation to the prediction of whether or not metastases will develop although chemotherapeutic treatment takes place. However, the present invention is based on the determination of 5 differentially expressed genes.

[0014] US20060183141A1 describes analysis of expression profile data to determine whether a pattern of expression or response will be predictive of cancer progression, including metastasis of breast cancer. Although the document discloses gene expression profiles, including FLJ20354, it does not envisage prediction of metastasis based on the 5 differentially expressed genes of the present invention.

[0015] US20040076955A1 discloses the use of IMAGE:4081483 in cancer diagnostics but not as predictor for metastasizing breast cancer. This document does not disclose a method for the prediction of metastasis based on the 5 differentially expressed genes of the present invention.

[0016] WO07016548A2 describes the identification of a breast cancer-specific signature of miRNAs that are differentially expressed in breast cancer cells, relative to normal control cells. An alteration (e.g., an increase, a decrease) in the level of the miR gene product in the test sample, relative to the level of a corresponding miR gene product in a control sample, is indicative of the subject either having, or being at risk for developing, breast cancer. Although the document discloses gene expression profiles, including UBE2R2, it does not envisage prediction of metastasis based on the 5 differentially expressed genes of the present invention.

[0017] Thomassen et al (Int. J. Cancer: 120, 1070-1075 (2006)) discloses a 32-gene profile, HUMAC32, which accurately predicts metastasis in low-malign breast cancer with a high degree of reliability.

[0018] WO06052218A1 discloses methods, systems, and compositions that provide a more useful measure of in vivo p53 functionality. These methods, systems, and compositions may be employed for the classification, prognosis, and diagnosis of cancers, including breast cancer. Specifically there is described a method for predicting disease outcome in a patient, the method comprising the steps of: obtaining gene expression profiles from a plurality of genes, including ZNF533, from tumor samples, wherein said tumor samples may be mutant or wildtype for the p53 gene; comparing said gene expression profiles to determine which genes are differentially expressed in the mutant or wild type tumors; deriving from said differentially expressed genes a set of genes to predict p53 mutational status; and using the set of genes to predict disease outcome in the patient. While this prior art does not explicitly disclose that ZNF533 may be used to predict the risk of metastasis it categorizes the gene as important in relation to the prediction of whether or not metastases will develop. However, the present invention is based on the determination of 5 differentially expressed genes.

[0019] WO9965928A2 describes the isolation of genes, including DTL, that are differentially expressed in primary or metastatic breast cancer. The compositions and methods of the present invention are particularly useful in diagnoses, prognoses and/or treatment of breast cancer. Although the document discloses gene expression profiles, including DTL, it does not envisage prediction of metastasis based on the 5 differentially expressed genes of the present invention.

[0020] van't Veer et al. (Nature, 415, 530-536 (2002)) discloses a 70-gene profile, including DTL which predicts metastasis in breast cancer with a high degree of reliability. Meanwhile the document does not disclose prediction of metastasis based on the 5 differentially expressed genes of the present invention.

[0021] The present inventors have developed a simple feature selection procedure based on a modified t-statistic to microarray experiments using the popular matched case-control design. Gene or feature selection is optimized by thresholding in a leaving one-pair out cross-validation procedure using the support vector machines (SVM) (Brown et al. 2000). Such an approach is necessary considering the advantages in a matched design because there are multiple factors (nodal status, tumor size, age, etc.) that convey important implications on tumor outcomes. Performance of the feature selection method is compared with that from PAM and from the ordinary paired t-test using receiver operating characteristics (ROC) analysis (Fawcett, 2006).

### SUMMARY OF THE INVENTION

[0022] The present invention relates to the use of a gene expression pattern (or profile or “signature”) which is clinically relevant to metastasizing breast cancer. In particular, the identity of genes that are correlated with patient survival and breast cancer recurrence are provided. The gene expression profile, whether embodied in nucleic acid expression, protein expression, or other expression formats, may be used to predict survival of subjects afflicted with breast cancer and the likelihood of breast cancer recurrence.

[0023] The invention thus provides for the use of a gene expression pattern (or profile or “signature”) which correlates with (and thus able to discriminate between) patients with good or poor survival outcomes.

[0024] The invention thus provides for the use of the gene expression pattern which correlates with the recurrence of breast cancer at the same location and/or in the form of metastases. The pattern is able to distinguish patients with breast cancer into at least those with good or poor survival outcomes.

[0025] The present invention provides a non-subjective means for the identification of patients with breast cancer as likely to have a good or poor survival outcome by assaying for the expression pattern disclosed herein. Thus where subjective interpretation may have been previously used to determine the prognosis and/or treatment of breast cancer patients, the present invention provides an objective gene expression pattern, which may be used alone or in combination with subjective criteria to provide a more accurate assessment of breast cancer patient outcomes, including survival and the recurrence of cancer. The expression pattern of the invention thus provides a means to determine breast cancer prognosis. Furthermore, the expression pattern can also be used as a means to assay, node negative tumors that are not readily assayed by other means.

[0026] The gene expression pattern comprises the genes defined in SEQ ID NO: 1 (FLJ20354), SEQ ID NO: 2 (IMAGE:4081483), SEQ ID NO: 3 (UBE2R2), SEQ ID NO: 4 (ZNF533), and SEQ ID NO: 5 (DTL), which is capable of discriminating between breast cancer outcomes with significant accuracy. The genes are identified as correlated with various breast cancer outcomes such that the levels of their expression are relevant to a determination of the preferred treatment protocols, of a breast cancer patient. Thus in one aspect, the invention provides a method to determine the outcome of a subject afflicted with, or suspected of having, breast cancer by assaying a cell containing sample from said subject for expression of the genes defined in SEQ ID NO: 1 (FLJ20354), SEQ ID NO: 2 (IMAGE:4081483), SEQ ID NO: 3 (UBE2R2), SEQ ID NO: 4 (ZNF533), and SEQ ID NO: 5 (DTL) as correlated with breast cancer outcomes.

[0027] A profile of genes that are highly correlated with one outcome relative to another may be used to assay an sample from a subject afflicted with, or suspected of having, breast cancer to predict the outcome of the subject from whom the sample was obtained. Such an assay may be used as part of a method to determine the therapeutic treatment for said subject based upon the breast cancer outcome identified.

[0028] The correlated genes SEQ ID NO: 1 (FLJ20354), SEQ ID NO: 2 (IMAGE:4081483), SEQ ID NO: 3 (UBE2R2), SEQ ID NO: 4 (ZNF533), and SEQ ID NO: 5 (DTL) are used in combination to increase the ability to accurately correlating a molecular expression phenotype with a breast cancer outcome. This correlation is a way to molecularly provide for the determination of survival outcomes as disclosed herein.

[0029] Over-expression of the genes defined in SEQ ID NO: 1 (FLJ20354), SEQ ID NO: 2 (IMAGE:4081483), SEQ ID NO: 3 (UBE2R2), SEQ ID NO: 4 (ZNF533), and SEQ ID NO: 5 (DTL) indicate that the patient has a high risk of developing metastases. The gene expression is profiled using an array of the polynucleotide probes defined in SEQ ID NO: 6, SEQ ID NO: 7, SEQ ID NO: 8, SEQ ID NO: 9, and SEQ ID NO: 10 that hybridize to the gene products (mRNA) of the genes defines in SEQ ID NO: 1 (FLJ20354), SEQ ID NO: 2 (IMAGE:4081483), SEQ ID NO: 3 (UBE2R2), SEQ ID NO: 4 (ZNF533), and SEQ ID NO: 5 (DTL).

[0030] The ability to discriminate is conferred by the identification of expression of the individual genes as relevant and not by the form of the assay used to determine the actual level of expression. An assay may utilize any identifying feature of an identified individual gene as disclosed herein as long as the assay reflects, quantitatively or qualitatively, expression of the gene in the “transcriptome” (the transcribed fraction of genes in a genome) or the “proteome” (the translated fraction of expressed genes in a genome). Identifying features include, but are not limited to, unique nucleic acid sequences used to encode (DNA), or express (RNA), said gene or epitopes specific to, or activities of, a protein encoded by said gene.

### DETAILED DESCRIPTION OF THE INVENTION

[0031] As outlined above the present invention is directed to a method for diagnosing/determining the risk of a breast cancer patient for developing metastases by establishing a differential expression of the genes SEQ ID NO: 1 (FLJ20354), SEQ ID NO: 2 (IMAGE:4081483), SEQ ID NO: 3 (UBE2R2), SEQ ID NO: 4 (ZNF533), and SEQ ID NO: 5 (DTL). In addition the present invention provides for a nucleotide array for prediction of risk of metastasis in breast cancer having probes specific for the genes SEQ ID NO: 1 (FLJ20354), SEQ ID NO: 2 (IMAGE:4081483), SEQ ID NO: 3 (UBE2R2), SEQ ID NO: 4 (ZNF533), and SEQ ID NO: 5 (DTL).

[0032] In the following the most important definitions of terms as used herein is provided.

[0033] A gene expression “pattern” or “profile” or “signature” refers to the relative expression of the genes SEQ ID NO: 1 (FLJ20354), SEQ ID NO: 2 (IMAGE:4081483), SEQ ID NO: 3 (UBE2R2), SEQ ID NO: 4 (ZNF533), and SEQ ID NO: 5 (DTL) between two or more breast cancer survival outcomes which is correlated with being able to distinguish between said outcomes.

[0034] A “gene” is a polynucleotide that encodes a discrete product, whether RNA or proteinaceous in nature. It is appreciated that more than one polynucleotide may be capable of encoding a discrete product. The term includes alleles and polymorphisms of a gene that encodes the same product, or a functionally associated (including gain, loss, or modulation of function) analog thereof, based upon chromosomal location and ability to recombine during normal mitosis.

[0035] The terms “correlate” or “correlation” or equivalents thereof refer to an association between expression of genes and a physiologic state of a breast cell to the exclusion of one or more other state as identified by use of the methods as described herein. A gene may be expressed at higher or lower levels and still be correlated with one or more breast cancer state or outcome.

[0036] A “polynucleotide” is a polymeric form of nucleotides of any length, either ribonucleotides or deoxyribonucleotides. This term refers only to the primary structure of the molecule. Thus, this term includes double- and single-stranded DNA and RNA. It also includes known types of modifications including labels known in the art, methylation, “caps”, substitution of one or more of the naturally occurring nucleotides with an analog, and internucleotide modifications such as uncharged linkages (e.g., phosphorothioates, phosphorodithioates, etc.), as well as unmodified forms of the polynucleotide.

[0037] The term “amplify” is used in the broad sense to mean creating an amplification product can be made enzymatically with DNA or RNA polymerases. “Amplification,” as used herein, generally refers to the process of producing multiple copies of a desired sequence, particularly those of a sample.

[0038] The terms “differentially expressed gene,” “differential gene expression” and their synonyms, which are used interchangeably, refer to a gene whose expression is activated to a higher or lower level in a subject suffering from a disease, specifically cancer, such as breast cancer, relative to its expression in a normal or control subject. The terms also include genes whose expression is activated to a higher or lower level at different stages of the same disease.

[0039] It is also understood that a differentially expressed gene may be either activated or inhibited at the nucleic acid level or protein level, or may be subject to alternative splicing to result in a different polypeptide product. Such differences may be evidenced by a change in mRNA levels, surface expression, secretion or other partitioning of a polypeptide, for example.

[0040] For the purpose of this invention, “differential gene expression” is considered to be present when there is at least a statistically significant difference between the expression of a given gene in normal and diseased subjects, or in various stages of disease development in a diseased subject.

[0041] For analysis of the microarray, it is preferable that the microarray also include “housekeeping” genes (control genes), or genes that are not affected by the same regulatory sequences, whose level of expression remains constant in the particular disease, state or disorder to be examined, so that the amount of expression can serve as a background level to be used for comparative purposes, to determine if a particular gene is turned on or off in that disease, disorder or other state to be examined.

[0042] Housekeeping genes are used to normalize results of expression. These are genes that are selected based on the relatively invariable levels of expression. Representative housekeeping genes include tyrosine 3-monooxygenase/tryptophan 5-monooxygenase activation protein, hypoxanthine phosphoribosyltransferase I (Lesh-Nyhan syndrome), Major histocompatibility complex, class 1, C, Ubiquitin C, Glyceraldehyde-3-phosphate dehydrogenase, Human mRNA fragment encoding cytoplasmic actin, 60S Ribosomal protein L I 3A, and Aldolase C.

[0043] An important aspect of the present invention is to use the measured expression of certain genes by breast cancer tissue to provide prognostic information. For this purpose it is necessary to correct for (normalize away) both differences in the amount of RNA assayed and variability in the quality of the RNA used. Therefore, the assay typically measures and incorporates the expression of certain normalizing genes, including well known housekeeping genes. Alternatively, normalization can be based on the mean or median signal of all of the assayed genes or a large subset thereof. On a gene-by-gene basis, measured normalized amount of a patient tumor mRNA is compared to the amount found in a breast cancer tissue reference set. The number of breast cancer tissues in this reference set should be sufficiently high to ensure that different reference sets behave essentially the same way. If this condition is met, the identity of the individual breast cancer tissues present in a particular set will have no significant impact on the relative amounts of the genes assayed.

[0044] To minimize errors and the effect of sample-to-sample variation, RT-PCR is usually performed using an internal standard. The ideal internal standard is expressed at a constant level among different tissues, and is unaffected by the experimental treatment.

[0045] A more recent variation of the RT-PCR technique is the real time quantitative PCR, which measures PCR product accumulation through a dual-labeled fluorigenic probe (i.e., TaqMan probe). Real time PCR is compatible both with quantitative competitive PCR, where internal competitor for each target sequence is used for normalization, and with quantitative comparative PCR using a normalization gene contained within the sample, or a housekeeping gene for RT-PCR. For further details see, e. g. Held et al., Genome Research 6:986-994 (1996).

[0046] A “microarray” is a linear or two-dimensional array of preferably discrete regions, each having a defined area, formed on the surface of a solid support such as, but not limited to, glass, plastic, or synthetic membrane. The density of the discrete regions on a microarray is determined by the total numbers of immobilized polynucleotides to be detected on the surface of a single solid phase support. As used herein, a DNA microarray is an array of oligonucleotides or polynucleotides placed on a chip or other surfaces used to hybridize to amplified or cloned polynucleotides from a sample. Since the position of each particular group of primers in the array is known, the identities of a sample polynucleotides can be determined based on their binding to a particular position in the microarray. The present inventors have surprisingly found that only a few control genes, such as “housekeeping” genes, are needed to reliable assess the differential expression of the genes of the present invention. It has been shown that only 10 control genes are needed in order to perform a correct assessment of whether genes of the present invention are differentially expressed or not. Preferably the present microarray incorporates 10-100, alternatively 10-1000 or 10-25000 control genes. In preferred embodiments of the invention the microarray incorporates, 100-500, 1000-2500, 5000-15000, or 20000-25000 control genes.

[0047] Because the invention relies upon the identification of genes that are differentially expressed, one embodiment of the invention involves determining expression by hybridization of mRNA, or an amplified or cloned version thereof, of a sample cell to a polynucleotide that is unique to a particular gene sequence.

[0048] Alternatively, and in another embodiment of the invention, gene expression may be determined by analysis of expressed protein in a cell sample of interest by use of one or more antibodies specific for one or more epitopes of individual gene products (proteins) in said cell sample. Such antibodies are preferably labeled to permit their easy detection after binding to the gene product.

[0049] The term “label” refers to a composition capable of producing a detectable signal indicative of the presence of the labeled molecule. Suitable labels include radioisotopes, nucleotide chromophores, enzymes, substrates, fluorescent molecules, chemiluminescent moieties, magnetic particles, bioluminescent moieties, and the like. As such, a label is any composition detectable by spectroscopic, photochemical, biochemical, immunochemical, electrical, optical or chemical means.

[0050] The term “support” refers to conventional supports such as beads, particles, dipsticks, fibers, filters, membranes and silane or silicate supports, such as glass slides.

[0051] As used herein, a “breast tissue sample” or “breast cell sample” refers to a sample of breast tissue or fluid isolated from an individual suspected of being afflicted with, or at risk of developing, breast cancer. Such samples are primary isolates (in contrast to cultured cells) and may be collected by any non-invasive means, including, but not limited to, ductal ravage, fine needle aspiration, needle biopsy, or any other suitable means recognized in the art. Alternatively, the “sample” may be collected by an invasive method, including, but not limited to, surgical biopsy.

[0052] “Detection” includes any means of detecting, including direct and indirect detection of gene expression and changes therein. For example, “detectably less” products may be observed directly or indirectly, and the term indicates any reduction (including the absence of detectable signal). Similarly, “detectably more” product means any increase, whether observed directly or indirectly.

[0053] The term “diagnosis” is used herein to refer to the identification of a molecular or pathological state, disease or condition, such as the identification of a molecular subtype of head and neck cancer, colon cancer, or other type of cancer.

[0054] The term “prognosis” is used herein to refer to the prediction of the likelihood of cancer-attributable death or progression, including recurrence and metastatic spread.

[0055] The term “prediction” is used herein to refer to the likelihood that a patient will respond either favorably or unfavorably to a drug or set of drugs, and also the extent of those responses, or that a patient will survive, following surgical removal or the primary tumor and/or chemotherapy for a certain period of time without cancer recurrence. The predictive methods of the present invention can be used clinically to make treatment decisions by choosing the most appropriate treatment modalities for any particular patient. The predictive methods of the present invention are valuable tools in predicting if a patient is likely to respond favorably to a treatment regimen, such as surgical intervention, chemotherapy with a given drug or drug combination, and/or radiation therapy, or whether long-term survival of the patient, following surgery and/or termination of chemotherapy or other treatment modalities is likely.

[0056] The present invention relates to the identification and use of a gene expression pattern (or profile or “signature”) based on the genes SEQ ID NO: 1 (FLJ20354), SEQ ID NO: 2 (IMAGE:4081483), SEQ ID NO: 3 (UBE2R2), SEQ ID NO: 4 (ZNF533), and SEQ ID NO: 5 (DTL), which discriminates between (or are correlated with) breast cancer survival and recurrence outcomes in a subject.

[0057] To determine the (increased or decreased) expression levels of genes in the practice of the present invention, any method known in the art may be utilized. In one preferred embodiment of the invention, expression based on detection of RNA which hybridizes to the genes identified and disclosed herein is used. This is readily performed by any RNA detection or amplification+detection method known or recognized as equivalent in the art such as, but not limited to, reverse transcription-PCR, and methods to detect the presence, or absence, of RNA stabilizing or destabilizing sequences.

[0058] Expression based on detection of a presence, increase, or decrease in protein levels or activity may also be used. Detection may be performed by any immunohistochemistry (IHC) based, blood based (especially for secreted proteins), antibody (including autoantibodies against the protein) based, exfoliate cell (from the cancer) based, mass spectroscopy based, and image (including used of labeled ligand) based method known in the art and recognized as appropriate for the detection of the protein. Antibody and image based methods are additionally useful for the localization of tumors after determination of cancer by use of cells obtained by a non-invasive procedure (such as ductal ravage or fine needle aspiration), where the source of the cancerous cells is not known. A labeled antibody or ligand may be used to localize the carcinoma(s) within a patient.

[0059] A preferred embodiment using a nucleic acid based assay to determine expression is by immobilization of one or more sequences of the genes identified herein on a solid support, including, but not limited to, a solid substrate as an array or to beads or bead based technology as known in the art. Alternatively, solution based expression assays known in the art may also be used. The immobilized genes may be in the form of polynucleotides that are unique or otherwise specific to the genes such that the polynucleotides would be capable of hybridizing to a DNA or RNA corresponding to the genes.

[0060] The present invention provides a more objective set of criteria, in the form of gene expression profiles of a discrete set of genes, to discriminate (or delineate) between breast cancer outcomes. In particularly preferred embodiments of the invention, the assays are used to discriminate between good and poor outcomes within 5, or about 5, years after surgical intervention to remove breast cancer tumors.

[0061] While good and poor survival outcomes may be defined relatively in comparison to each other, a “good” outcome may be viewed as a better than 50% survival rate after about 60 months post surgical intervention to remove breast cancer tumor(s). A “good” outcome may also be a better than about 60%, about 70%, about 80% or about 90% survival rate after about months post surgical intervention. A “poor” outcome may be viewed as a 50% or less survival rate after about 60 months post surgical intervention to remove breast cancer tumor(s). A “poor” outcome may also be about a 70% or less survival rate after about 40 months, or about a 80% or less survival rate after about 20 months, post surgical intervention.

[0062] In one embodiment of the invention, the isolation and analysis of a breast cancer cell sample may be performed as follows:
[0063] (1) Ductal lavage or other non-invasive procedure is performed on a patient to obtain a sample.
[0064] (2) Sample is prepared and coated onto a microscope slide.
[0065] (3) Pathologist or image analysis software scans the sample for the presence of non-normal and/or atypical breast cancer cells.
[0066] (4) If such cells are observed, those cells are harvested (e.g. by microdissection).
[0067] (5) RNA is extracted from the harvested cells.
[0068] (6) RNA is purified, amplified, and labeled.
[0069] (7) Labeled nucleic acid is contacted with a microarray containing polynucleotides of the genes identified herein as correlated to discriminations between breast cancer outcomes under suitable hybridization conditions, then processed and scanned to obtain a pattern of intensities of each spot (relative to a control for general gene expression in cells) which determine the level of expression of the genes in the cells.
[0070] (8) The pattern of intensities is analyzed by comparison to the expression patterns of the genes in known samples of breast cancer cells correlated with outcomes (relative to the same control).

[0071] A specific example of the above method would be performing ductal lavage following a primary screen, observing and collecting non-normal and/or atypical cells for analysis. The comparison to known expression patterns, such as that made possible by a model generated by an algorithm with reference gene expression data for the different breast cancer survival outcomes, identifies the cells as being correlated with subjects with good or poor outcomes.

[0072] Another example would be taking a breast tumor removed from a subject after surgical intervention, isolation and preparation of breast cancer cells from the tumor for determination/identification of atypical, non-normal, or cancer cells, and isolation of said cells followed by steps 5 through 8 above.

[0073] Alternatively, the sample may permit the collection of both normal as well as cancer cells for analysis. The gene expression patterns for each of these two samples will be compared to each other as well as the model and the normal versus individual comparisons therein based upon the reference data set.

[0074] With use of the present invention, skilled physicians may prescribe treatments based on prognosis determined via non-invasive samples that they would have prescribed for a patient which had previously received a diagnosis via a solid tissue biopsy.

[0075] The above discussion is also applicable where a palpable lesion is detected followed by fine needle aspiration or needle biopsy of cells from the breast. The cells are plated and reviewed by a pathologist or automated imaging system which selects cells for analysis as described above.

[0076] The present invention may also be used, however, with solid tissue biopsies. For example, a solid biopsy may be collected and prepared for visualization followed by determination of expression of one or more genes identified herein to determine the breast cancer outcome. One preferred means is by use of in situ hybridization with polynucleotide or protein identifying probes for assaying expression of said genes.

[0077] In an alternative method, the solid tissue biopsy may be used to extract molecules followed by analysis for expression of the genes of the present invention. This provides the possibility of leaving out the need for visualization and collection of only cancer cells or cells suspected of being cancerous. This method may of course be modified such that only cells that have been positively selected are collected and used to extract molecules for analysis. This would require visualization and selection as a prerequisite to gene expression analysis.

[0078] In a further modification of the above, both normal cells and cancer cells are collected and used to extract molecules for analysis of gene expression. The approach, benefits and results are as described above using non-invasive sampling.

[0079] The genes identified herein may be used to generate a model capable of predicting the breast cancer survival and recurrence outcomes of an unknown breast cell sample based on the expression of the identified genes in the sample. Such a model may be generated by any of the algorithms described herein or otherwise known in the art as well as those recognized as equivalent in the art using genes disclosed herein for the identification of breast cancer outcomes.

[0080] The detection of gene expression from the samples may be by use of a single microarray able to assay gene expression from some or all genes disclosed herein for convenience and accuracy. Other uses of the present invention include providing the ability to identify breast cancer cell samples as correlated with particular breast cancer survival or recurrence outcomes for further research or study. This provides a particular advantage in many contexts requiring the identification of cells based on objective genetic or molecular criteria.

[0081] The materials for use in the methods of the present invention are ideally suited for preparation of kits produced in accordance with well known procedures. The invention thus provides kits comprising agents for the detection of expression of the disclosed genes for identifying breast cancer outcomes. Such kits optionally comprising the agent with an identifying description or label or instructions relating to their use in the methods of the present invention, is provided. Such a kit may comprise containers, each with one or more of the various reagents (typically in concentrated form) utilized in the methods, including, for example, pre-fabricated microarrays, buffers, the appropriate nucleotide triphosphates (e.g., dATP, dCTP, dGTP and dTTP, or rATP, rCTP, rGTP and UTP), reverse transcriptase, DNA polymerase, RNA polymerase, and one or more primer complexes of the present invention (e.g., appropriate length poly(T) or random primers linked to a promoter reactive with the RNA polymerase). A set of instructions will also typically be included.

[0082] The methods provided by the present invention may also be automated in whole or in part. All aspects of the present invention may also be practiced such that they consist essentially of a subset of the disclosed genes to the exclusion of material irrelevant to the identification of breast cancer survival outcomes via a cell containing sample.

[0083] Having now generally described the invention, the same will be more readily understood through reference to the following examples which are provided by way of illustration, and are not intended to be limiting of the present invention, unless specified.

### BRIEF DESCRIPTION OF THE DRAWINGS

[0084] FIG. 1 shows the probability of metastasis calculated by SVM using leaving one-pair out cross-validation based on the 32-gene signature by PAM (1a), the 5-gene signature by the method of the present invention (1b) and the 43-gene signature by paired t-test (1c) for the 13 pairs of low-malignant T1 (asterisk) and 17 pairs of low-malignant T2 (triangle) patients. The best performance is achieved by the 5-gene signature of the present invention with improved prediction accuracy and better separation.

[0085] FIG. 2 shows ROC analysis for model comparison with the curves for the present method (New method), for PAM (PAM) and for the paired t-test (Paired T-test). The new method exhibits higher efficiency in its performance. The high AUC for our new method (0.86) indicates that it outperforms PAM (AUC=0.83) and the paired t-test (AUC=0.80).

### EXAMPLE

[0086] Generation of Microarrays

[0087] 3-D activated CodeLink glass slides for arraying (manufactured by Surmodics, Inc., Eden Praire, Minn.) were purchased from Amersham Bioscience. The slides are coated with a long-chain, hydrophilic polymer containing amine-reactive groups permitted to covalently attach to 50 amino modified ends of oligonucleotide targets. In a series of experiments, humidity, spotting time, and pin performance were tested with a panel of 18 test oligonucleotides. A human oligonucleotide library composed of 29,134 oligonucleotide targets (60-mers) recognising 28,830 genes (designed by Compugen Ltd., Jamesburg, N.J.) and with a 50 amino linker modification was purchased from Sigma-Genosys (The Woodlands, Tex.). The oligonucleotides have been designed to include known genes, expressed sequence tags, and the majority of known alternative splice variants (http://www.labonweb.com/oligo). The polynucleotides comprise probes defined in SEQ ID NO: 6, SEQ ID NO: 7, SEQ ID NO: 8, SEQ ID NO: 9, and SEQ ID NO: 10, which hydridise to the transcription products of the genes defined in SEQ ID NO: 1, SEQ ID NO: 2, SEQ ID NO: 3, SEQ ID NO: 4, and SEQ ID NO: 5. According to the CodeLink protocol, oligonucleotide targets were solubilised in 150 mM sodium phosphate buffer (pH 8.5) at a final concentration of 20 pmol/l. Oligonucleotide targets were arrayed in duplicate by a spotting robot (Virtek ChipWriter Pro (ESI)) onto 50 slides in a controlled environment with a humidity of 38% inside the spotting compartment.

[0088] Duplicate spots were 9 mm apart. 24 SMP 2.5 stealth pins (TeleChem International Inc., Sunnyvale, USA) were used for printing and each spot was about 100 micrometer in diameter and spot centres were 124 micrometer apart. After printing, slides were incubated overnight at 70% humidity and blocked as recommended by the manufacturer. Dried microarray slides were stored in a desiccated environment at room temperature.

[0089] Preparation of cDNA and cRNA

[0090] Universal human reference RNA was a source for hybridisation to the slides described previously and was prepared according to the manufacturer's protocol (Stratagene, Calif., USA). Labelling of cDNA probes. 10 microgram of universal reference RNA was added to DEPC treated water to a final volume of 12 microliter and amino allyl modified cDNA was prepared and purified using the FairPlay Microarray Labelling Kit (Stratagene, Calif.). Coupling of the fluorescent dyes Cy3 and Cy5 (Amersham Bioscience) to the modified cDNA and subsequent purification was done using the same kit. The volume of purified labeled cDNA was reduced to 20 microliter using centrifugation under vacuum.

[0091] Labelling of cRNA

[0092] Probes were prepared from 2 microgram universal reference RNA using the Ambion (Austin Tex., USA) Amino Allyl MessageAmp RNA kit (referred to as MessageAmp) as described in the manual. Briefly, cDNA synthesis was performed with oligo(dT) primers also containing a T7 RNA polymerase recognition site. After second cDNA strand synthesis, amplification was performed with T7 RNA polymerase and the resulting aRNA was purified with filter cartridges included in the kit. An aliquot of 15 microgram aRNA was labelled with Cy5 fluorescent NHS-esters. Aliquots of 15 microgram aRNA were transferred from all samples and pooled to use as a reference and labeled with Cy3. The labelled aRNA was purified with filter cartridges to remove unbound dyes and 2.6 microgram of Cy3 labeled aRNA was added to 2.6 microgram of each Cy5 labeled sample. Samples were fragmented using 1 microliter Fragmentation Reagent (Ambion) followed by incubation for 15 min at 70° C. One microliter of stop solution was used to terminate the reaction.

[0093] Preparation of Spike RNA

[0094] A cDNA sequence from Trichoplusiani (Accession No. AY345124) was obtained from NCBI and blasted against the human genome resulting only in hits with very low homology. The software Oligowiz was used to design an oligonucleotide with the following sequence:

tctatttctgcgctggtggtgtgatttgtgattggccgcagaacgtaaactgtaacagcagaatgttctttgctgctctcagaatcacg ccagctactaag. This oligonucleotide was PCR amplified with the forward primer: taatacgactcactatagggagatctatttctgcgctggtggtg including a T7 polymerase recognition site and the lower primer tttttttttttttttttttttttttcttagtag ctggcgtgattc including a poly(dT) sequence stretch. The PCR product was used as template for in vitro transcription with the T7 MEGAscript kit (Ambion). The resulting RNA was spiked in 10-fold dilutions into aliquots of total RNA, processed with the MessageAmp kit and aRNA was hybridised to chips containing a complementary sequence (underlined sequence). The linear range of the system was examined by plotting the signal from the spots as a function of initial amount of spike RNA.

[0095] Hybridisation and Scanning

[0096] Hybridisation and washing were performed identically for all arrays. Each cDNA or cRNA mixture was adjusted to 4×SSC, 0.1% SDS, and 0.1 microgram/microliter sonicated salmon sperm DNA (Stratagene) in a final volume of 80 microliter. Samples were denatured for 2 min at 95° C. and spun at 14,000 rpm for 5 min to remove precipitated probe.

[0097] Samples were hybridised to microarray slides using lifter slips (Erie) as covers and placed in humidified CMT-hybridisation chambers (Corning Inc., Corning, N.Y.). Hybridisation was done overnight at 42° C. in a water bath for 17 h. After hybridisation, slides were removed from the chambers and lifter slips were gently removed from the slides by soaking in 4×SSC in a wash station (TeleChem International Inc., Sunnyvale, USA). Slides were washed by immersion into 2×SSC, 0.1% SDS twice at hybridisation temperature for 5 min, in 0.2×SSC and 0.1×SSC, each of them at room temperature, for 1 min, and dried by centrifugation at 1000 rpm for 5 min. Detection of Cy3 and Cy5 fluorescence signals was performed on an ArrayWoRxe CCD scanner (Applied Precision), and images were generated for the Cy3 and Cy5 channels with the accompanying ArrayWoRxe software.

[0098] Data Preprocessing

[0099] Identification of spot locations and quantification were performed using ArrayWoRx software. Approximately 80% of each spot area was used for quantification of Cy3 and Cy5 fluorescence signals. The raw intensity data were corrected for local background and normalised using the variance stabilization normalization procedure implemented in the R based Bioconductor package (http://www.bioconductor.org). Outputs of the procedure are normalised expression values in log scale (base 2) for Cy3 and Cy5 signals (log2Icy3, log2Icy5).

[0100] Data Analysis

[0101] For descriptive analysis of accuracy, median and 95% intervals were calculated for the relative expression. Precision was determined as 95% intervals and coefficient of variation (CV) of the ratios of relative expression values or ratios of single channel data between pairs of chips. By treating each spot on an array as an object and the arrays as repeated measurements for the objects, the intraclass correlation coefficient (ICC) was introduced to examine the reproducibility of the arrays and for comparing the ICCs between the chips made using different labelling methods (MessageAmp or FairPlay). In order to compare the ICCs between the two labelling methods, a computer re-sampling approach was employed by bootstrapping the spots on the arrays to obtain empirical distributions of the observed ICCs. In addition, the analysis of variance (ANOVA) model was introduced to detect the day as well as the labelling effects on gene expression variation for each gene. The false discovery rate (FDR) (Reiner et al. 2003) was calculated to adjust for multiple testing. In order to assess sequence variation in relative expression values within and across the arrays, the mean square (MS) for intra-chip variation was calculated.

[0102] The method of the present invention is applied to a microarray dataset on tumor metastasis from low-malignant breast cancer patients collected in our lab (Thomassen et al. 2006a). In this study, 13 low-malignant T1 (tumor size in diameter T≦20 mm) and 17 low-malignant T2 (20 mm<T≦50 mm) tumors from patients who developed metastases were matched to metastasis-free tumors from patients (followed up for about 12 years after diagnosis) of the same tumor type and according to year of surgery, tumor size, and age. Gene expression analysis was performed on 29K oligonucleotide arrays with duplicated measurements for each gene (Thomassen et al. 2006b). Data were normalized using the variance stabilization normalization method (Huber et al. 2002) implemented in the free R package vsn in Bioconductor (http://www.bioconductor.org).

[0103] The study by Thomassen et al. (2006a) identified a 32-gene signature that classifies the 60 tumor samples with a mean accuracy of 78% (specificity 77%; sensitivity 80%) using leaving one-pair out cross-validation (FIG. 1a). In the analysis, feature selection was done using the nearest shrunken centroids methods in the R package pamr (Tibshirani et al. 2002) and classification done using SVM in the R package e1071. It should be noted that the feature selection procedure using pamr does not take the paired matching into account in identifying the subset of genes for training and prediction.

[0104] Using the method of the present invention the data are re-analyzed by introducing the modified t-statistic for paired data in defining the gene expression signature for predicting metastases. The analysis achieved an overall accuracy of 83% (Δ=0.396) with a specificity of 83% and a sensitivity of 83% using a subset of only 5 genes (FIG. 1b), namely the genes defined in SEQ ID NO: 1, SEQ ID NO: 2, SEQ ID NO: 3, SEQ ID NO: 4, and SEQ ID NO: 5. Comparing FIGS. 1a with 1b, one can see that the method of the present invention has improved separation based on prediction probability and increased efficiency (median of correct prediction probability: 0.88 versus 0.86 for metastasis and 0.84 versus 0.81 for non-metastasis). For further comparison the ordinary paired t-test for gene selection is introduced. Here the thresholding is imposed upon the ordinary paired t-statistic, i.e. genes with |ti|−Δ>0 are picked up. Likewise, the optimal subset of genes through cross-validation by leaving one-pair out is selected. The classifier based on the expression signature specified by the ordinary paired t-test yields an average accuracy of 74% (specificity 74%; sensitivity 74%) when Δ is set to 3.1 (43 genes selected). The cross-validation probabilities plotted in FIG. 1c shows that the model based on ordinary paired t-test has the lowest efficiency (median of correct prediction probability: 0.85 for metastasis and 0.83 for non-metastasis) even though the method makes use of the paired design. The overall performances of the 3 methods using ROC analysis was finally evaluated. Based on the cross-validation probability of metastasis from SVM and the observed metastasis status for each sample, one is able to draw the ROC curves and show it in FIG. 2 with the curves for the new method, for PAM, and for the paired t-test. Visualization of FIG. 2 indicates that the method of the present invention exhibits higher efficiency as compared with the others. This is further confirmed by calculating the AUC, a standard summary metric for assessing the overall performance of a classifier. The high AUC for the herewith invented method (0.86) again shows that it outperforms PAM (AUC=0.83) and the ordinary paired t-test (AUC=0.80).

[0105] The present inventors have therefore introduced a simple feature selection method for predicting tumor metastases in paired microarray experiments. Model comparison through empirical application shows that the method manifests high efficiency and outperforms existing methods. As shown, the ordinary paired t-tests has the worst performance as compared with the other two methods which use modified t-statistics for thresholding to eliminate genes that do not contribute towards class prediction. Although both the modified and the ordinary paired t-statistics make use of the matched design, the better performance of the method of the present invention is achieved by thresholding upon a new metric that is less dependent on gene-specific variances which helped to filter statistically significant genes due to small standard errors in their differential expressions.

[0106] It is more interesting to compare the performances between the present method and PAM. Although both methods use the modified versions of t-statistics, the present method takes the following advantages of the paired design in selecting informative features. First, as a popular method in cancer research (Breslow and Day, 1990), the paired design helps to minimize the influence on tumor metastasis from non-transcriptomic factors such as age, clinical stage, treatment, etc (Gonzalez-Angulo et al. 2005).

[0107] Second, in a transcriptomic study on tumor metastasis, these confounding factors not only affect the metastasis phenotype which is of our primary interest but could also influence the transcriptional profiles of genes. Ignoring these influences will simply introduce noise in feature selection resulting in low accuracy of the classifier.

[0108] A good classification signature should be a minimal subset of genes that is not only differentially expressed but also contains most relevant genes without redundancy (Peng et al. 2006; Baker and Kramer, 2006). A comparative analysis on data across several studies has found that classification rules for the 5 genes of the present invention can achieve comparable performance as that for 20 or 50 genes (Baker and Kramer, 2006).

[0109] Finally, it is necessary to point out that the paired experiment design in studying tumor metastasis using two-channel cDNA microarrays can be further advantaged by the reduced experimental cost when directly labeling, for example, metastasis mRNA with cy5 and non-metastasis mRNA with cy3 in each matched pair. Since the method of the present invention works with the pair-wised difference in the log expression values, the feature selection algorithm is valid for both one- and two-channel microarray platforms.

The application's sequence listing, which the Patent Office published only in electronic form, follows.

SEQUENCE LISTING (10 sequences)

SEQ ID NO: 1 - DNA, 21772 bp, Homo sapiens
  gene (1)..(21772)
  gene (1)..(21772): FLJ20354
  ref <308>: DATABASE ACCESSION NUMBER: GenBank/NC_000001 REGION: complement(68713526..68735295)
  ref <309>: DATABASE ENTRY DATE: 2008-03-03
  ref <313>: RELEVANT RESIDUES IN SEQ ID NO: (1)..(21772)
gacgccaccgggcgctgacagacctatggagagtcagggtgtgcctcccgggccttatcgggccaccaagctggtaagacagctcggatagacgggaccggtcagcgggctgacggcagtcaccactgttcgcagttttacctcgaccgttcgcagttttacctcggtcggagggatgagtcccaggatccctaggttcagtgaaaaggctggcgaggagaagtagcgggtatgcaacccttgccagactcaccgctccctctattttgagggtctgggcctcaggtccgaaaggaagcgccgcgcgtaggccgcaccagactcgctatgaggagcgactcctgtgcctggtgtggccggcgtcccgtgggggcgtcttagaatattccgatttggccgctcacctcgcctgattttctacccgcctcagaattagggaacaattgggaatgaggtccaaagctttgtagggttaggtggggggcaagcccgaatgtggcaattttgtttattgaacccatagaatttaacgcaggatgtatcggccgaatagcactaggataacagctgcctgtttcaaaacggtatttctgagtacccatcagtaaccactgctggtggtccctgaattgcacgtacagcactcctaacgcgttttgtgcagttgggtcttcggttctataggatactgtggtgctggttatgtgacgttaggtgagtcccctaccttctgtgagcctgtttccacattggtaaaggttactaatacatgcttgccttaaggggtttcccaggaggatgctgttttttaaagtgtgttgtgatctgcagaataacaagcattttcctcttaggaatgcccttcagacgagcatgtattattagccctactttatcaggtgcacactgaggctcacagacgttaaatgccctctagagtcacatcaacagcaagtggcagagctagaattcagatcttcctggtatggcgatcttacatggattctgctacttagtaagttattggctatatttaccaatatgaaggatagaatttaggacaggaaggaacctcaatcagtagtcctgccacattatttaaaacccattagatgaaagtagtataagcacgctgaaaaagaaaacatgcactgaatgcttactagtacttcacatatattacatcattttatcattccaataagcccattcgttaggtccttttgtccctgttttgtggttaaggagattgaggcatagagattgaagataggcccaaaaagtcataaacaatagtggcagagctagagctgggaaaccagccctactagtctaactccagagcctgttcttaaagccactaccctgtactgcatctcaggaaagccgttctgtaatctcccttagtacagagtccctttctgtcatttttattactgtgtcctcaggccagtacagagtgagcagctcaatatcagtttctagagtcaatcacacctgggtttgaatgcctaggttcatcacttagctgtgtgaccttggtcattttattaatctctctgctttattttccttatgtgaaaaatgagaaattaatagtacctattcatagaattggggtaattaaagtgaaataatgaatgtgaagcacagtgctaccaacattaatattaattgaggtaaaaaacagggatgaatgttttctctattgattgtagttcttccttatttccagatttcttaaataagctcaggatcttaaataaggatcttagatcagccaatgaagttcttctaataaaaaagctattacataaaaatattactacagcactagaattaataaaaagaaagcagtgtaagatataatttttttttttttgagactgagttttgctcttgttgccaaggctagagtgcaatggtgcaatctcagctcaccgcaacctccgcctcccaggttcaagtgattctcctgactcagcctcctgagtagctgggattataggcatgcaccactatgcccagctaattttgtatttttagtagagacggagtttctccatattggtcaggctggtctcgaactcccgacctccggtgatccacccgcatcggcctcccaaagtgctgggattacaggcatgagccaccgtgcccggccagatataaaattttatatggcacaaataagatgaatgattcttcaagaatttttatgatataatcagatgtgaattaaagaattttctttacctaatgtacttcaaatcaatatgagatttaatttttcttcaattttttaaaaatattttccttctttttacagtggaatgaagttaccacatcttttcgagcaggaatgcctctaagaaaacacagacaacactttaaaaaatatggcaattgtttcacagcaggagaagcagtggattggctttatgacctattaagaaataatagcaattttggtcctgaagttacaaggcaacagactatccaactgttgaggaaatttcttaagaatcatgtaattgaagatatcaaagggaggtggggatcagaaaatgttgatgataacaaccagctcttcaggtaatgaacagatatgtaactgtaaaactgaattactgtaaagttttatctctacttatattatacttttactataacagcagcttcttcaaagaagttttatttctttggaaaactattaatgctgttagttcaactaaaatcatttagaaaaattgtaatgtgaaagttaattgctacaaaatttaaagtttttaagtgttagcatatataataaagtagggaattggaagggaaatactgatgtattatcacttccgcatattctgaacactttataacattttaaggacatattactgacctttagttgcatagtttctagattataagttcacagatccttcccttcaaacatataatttaatttaagaatacatgtaataggataatagcaaatcttacataataaataacagacaaataacaggaccaggtaaagtggctcatgcctgtaatcccagcactttgggaggctgaggtgggcggatcaacttgaagctaggagtttgagaccagcctggctaacatggtgaaaccccgtctctactaaaaatacaaaaaatgagttgggtgtagtagcacacacctgagactgaggcacgagaactgcttgagcctgggaggtggaggttgcagtgagctgagattgcaccactgcactccagcttgggcgacagagcaagactatctcaaaaaataacaatgataacagaagaaatataccacaggttaaagagaatatttattaagcagttaagatataacagaaactctgtttgatgatttacatatgtgttcttacttaattgctatagtagccaagcagggtaggtattaaccccttttaacagatggggaaactgagaccatgcttcaacaaatcttgttctgtctgcctgaaatgtttttccaccgtgagacactgtacacatttgtcaggctagtaaacttatacatttcttttaatctcagctcctttatagcctcttctgtggagcttttctgattcccacaggtcagcataattgctttttctcttatgacctacggttctttgttatgtatccattaaactaggcctgtggaatctaatgcccatgctttttttttcctacaacattaggtacttttcaaatgaaatgtctaagaatttattgtttcctatgtaccaaaaatgatttatgtcatacaagtaaactacaataacaatcatatgaataatccattttgtatagcactctacaaatcttccctctcttaactactccccagttatctttgtgggctcctttactgctgctcatcctttaactctcccatcttcaagttcctgcccttgtccttacttcaccttctccctaggcaatctcatgccatgtcttcgcctacttttcttaagactttcaggcctctcctgaaatatctttcctgagcgttcggcccatgttttttcatctgcctcctggaaaggcacttcaaataaaccgtatagaaaaatgactatcaccctctaacctaagttttgtcttcttaggtttcctatctgaataaattgcattgccttccctatagttgccttgattctttccctttcttgtcctttaaatatgatttagtctattgtgctccctaagtagttctctgatctgtacacatctctctccaagatgaatcttctttttgttaggctataattcttacctggatttctctttatttgttttgcttttgttttacctggatttctgcataaatcctcaactagtctctctgcccctagtcttttctgcctcctgggttcaagctatcctcccacctcagcctccaaagtagtggggactacaggcacacaccaccacgcccagctaatttttgaattttttgtggacacggggtttcactatgttgcccaggctggtctcaaactcctgagctcaagggatccacccaccttgaccttccaaagtgctgggattacaggcatgagccaccacgcccggcctctcctagtcttttacgatcgtaacaaaactataaagtacataaaaataaagtttaccaaaaatgtgtaagaccttattggagaaaagtattaaattgtattaaatagaataaatggagaaagataccctgttcatgaatgaaaatacttagtacatgtatatacaagtcaattcctcccaaattgaaatagaaattcagtgcattttcattcaaaacttcaatatagtttctttgtggaacttgataagcagattctaaaattcatttggtaaaagtctaagagaattttgaagaccaaggtcaaacttctgaggtgttcaaacttttgaggtcactacaaactttttgaataaatttgatgtatggggccaggcagagtggctcacacctgtaatcccagcacttttggaggccaagacaggaggatcacttgaacccaggagttcgagaccagtctggataacatagtgagaccctgtctctacaaaaaaaaaaaaaaaaattaattagccaggcatggtggcatatgcctgtggtctcatctacttgggaggccgagcccgggaggttgagactgtagtcagccgtgatcacactactgcactccatcctgggtgacagagtaaaacttggagaagaaaaaaaaattgatatatggtaaaagatatgataaagtgaaaaaacaccaaaccacatattgtttatatacatttattaaaagtataaaagcatggaaaagaaatacaactataggtttattttatgaaactgtaagtttatattttactctcccttagagggagatatgaatgagcaaagaatttcattttttttaaaaaaggagttatttacactcccaccaacagtgtataaacattccattttctccgcaaccttgccagcacctgttatttttttgttttttaatagtgtccattctgactggtgtgagatggtatctcattatagttttgatttacatttctccaatcagtaatattgaacttttttcatatgcttgttggctgcatatatgtcttcttttgaaaagtgtcagttcatgtcctttgccccctttttaatggagttgcttttaaatttaagttccttgtaaatgctggatactagacctttgtcagattcatagtttgcaaaaattttctcccattcgataggttgtctgttgactccattgatagttttcttttgctgtgtagctccttcatgtaactacagtccatttgtcaatttttgcttttgttgcaactgcttttagcatcttcatcatgaaatctttgcccattctaatgtccagaatgatattgcctaggttttcttccaggttttttatagttttgggttttacacttaactctttaatccatgttgagttaatttttgtatatggtgtaagaaggtgtcccatttcaatcttcggcatgtaacttaccagttatcccagcactatttgttaaataggaaatcatttcccccattgcttgtttttgtcagctttgctgaagatcagttggttgtaggtgcatggccttatttctgggctctgtattctgtttcattagtctatgtgttggtttttataccagtaccattttgttttggttactacaggcctgtagtatagtttgaattctggtagcatgatgcctccagctttgttcttttttcttaggatagccttggctatttgggctctttttggttccatatgagttgtggacaacagtataatgattcattaaaatcctaaaaccagaactaccatttaacctaacaatccctttactaggtatataccctaaggaatataaatcattctgtcatgaagacacatgtacacgtatgttcattgcagcagtattcacaatagcaaagacaatgagtcaacctgaatgtccctcagtggtatactggatgaagaaaatgtgtacatatacaccatggaatagtatgcagccataaaaaagaatgagttcatgtactttgcaggaacatagatggaggtggaggcaaactaaggaacagaaaactgaatatcacatgctctcacttacaagtgggagctaactgatgagaacacatggacacatagaggggaacaatagacactggggcctattggacaatggaaggtgtgaggagggagaggttcaggaaaaatgactaatgggtactaaatacttgggtgatgaaataatccgtacaacaaacctccacaacacaagtttacttatgtaagaaacctgcacatgcacccctgaacttaaaataaaagtttaaaaaaattaaaggagaagtctggcaaaatgtcaacaattacattggttgccagttacatacatgggtattgttttattatatctttgaagtattttatattaaaataaaaggaggccaaaacattacaatcaaaagaagcaatagaaactaagttccagaaatgaggacaaacacaaacaaaagagggaatatacaaactagataactcatcaaagaaatttagaaaatgtagcattctagagccattttgtgtgtaagcaatacccctctaccagaattgaccctaataataaccctgaattatccagaaataaagttaaaatatacacaatatactaaagaaaaaaggaacctattttttttaaaggtttaatgggaaaatttatttgtctagaatctttattacttggtagtattaataagtcaggctctttatgtgaattttaaaaaaaaaataggctctaaaagtttgtttctaatctcacattatttaattgcttattgtttttaaaccagatttcctgcaacttcgccacttaaaactctaccacgaaggtatccagaattgagaaaaaacaacatagagaacttttccaaagataaagatagcatttttaaattacgaaacttatctcgtagaactcctaaaaggcatggattacatttatctcaggtaacacatccttttactaattactagtttaaatataattatgatgtactcaatgatagaatcattaaaagtaaattattctttaatatttaaagccagaactgaaacctcctaacctacattacattctaaatatgtatatataaaattgtttgtaacccatagaaagaataataaaaatgatagtgagacataattgaaaacaacagttatataatttaagtgtgttttggtttaaattgatttgagggtggtagggacaactgcaaaattaaaaactccattaccatattacattatttctttgggagatactttatagctccacaatggactgatagtaatagaattattgttgctttcaatatttaaaaaatttgagcataacagattaaaccaaaataatccttttttcaggaaaatggcgagaaaataaagcatgaaataatcaatgaagatcaagaaaatgcaattgataatagagaactaagccaggaagatgttgaagaagtttggagatatgttattctgatctagtaagataaaattaagctttaatgaagttcctgatgtgttctgattattaatttgacattttcatcaaaatatgcaaatgaatcagaacagattaattctgaaagcttagaatgcaacctgtatatgtgtttttaaataaatactcttgttatagctctagtagagtagaaattgaatgtttcggtatgattcaccttttctttgaatcaacattatggccatagtttgggatatatattggaatccttttaagattattgagataaatgtatttgaaaggggatactaaatataagtcttagaaatttggttaaaaaaataaaatattctgatggctttgtttactagtcatattcatatgtataatctatttatgaagaaaaaaagttaatattctttcttctatttagcctgcaaaccattttaggtgtgccatccctagaagaagtcataaatccaaaacaagtaattccccaatatataatgtacaacatggccaatacaagtaaacgtggagtagttatactacaaaacaaatcaggttggtattaataaaataattggacttttaaaaacttgccaacaaggttgcagctatagtagtgtaaagagagacccaaatattgaaagtagaatactttcatggagcatcagaggggctatcataagttctttagtaataacagtggaataatttttaagtgagtattattcgtgctagtataagaaatattttgtctgctaagataaattcatgcatggtatttaaaaaaatgacaaagttaagcatccaaaaggtatacaaatataagaaaagttttgattaagcacatttttgttgagggcctccaacacgtcagacattgtgctaaagattaatgataagtaagatagaaatggtccatactctcatgaggcttacatgagtagttatgtacaaattaacaggagtcaaacatatatacaaaactgtaataacacaacaaaataagctcagactttcaagatgaggattctaaagggactggcttttttgttttatatatttatatagttgattgatttcagatttagatacaaaaatcagggaaataattcaagctagatagatgtattagaaaacttagattatgagaaaggtatccataaatctctcaaaatcgtagctgatgtttttatgataagtttctgtctgtggaattaactgacatatgctactttggttttctttttatgggcaagaactttgagtttttaattgtaggagcaaaaggtaaatgttaaaactgatgagtttgctatgtggcatatgtatgtggctgtagaccagtcccttcttccattacctaaaataatatggttaacagtatattccctcatttaagatttctattctttgtaaccctgtgtaaaaaaaatgctagatttctatggaacatattttatttagtggcactcgaaagattttaagcaaacttcactataaaagcagcataatagtgagatacagttcatttcaatcttaggtctcacccaaatcagtaatattcaaatagcatagcaataggcagaatagaaacaaggatgaagaaaagatagtggtagtagataaaaatgaacgtggagtttatatctaaacactccctcaaaataatcctcaatttggcagtatttaattgttatatgtaatatgaatcaaactcagaatccataattttttcagactttttctattttaaaatattgacttgatcctgtgtcttattaaacatataatactttttaatcctggtaatacacacatatacaaatgtaacatgtatgtgtatgtgtatatacatatatataattgcacgtaagtgtgatattttaaaatatactatcataaaaaatgtatggtttacttagtaatatttttctttttgtgtagatgacctccctcactgggtattatctgccatgaagtgcctagcaaattgtaagttaaatatatgtgtgtgtgtgtgtgtgtgtgtgtgtgtgtgtgtgtgttatattgatagtatttaacaagaaccaaggaaatttaataaagtcctgataaaattaaagtatatcatttctctttatttataaatgaaagtctagtggaatttattacattatggagcccttaattttttctgtttagaaaggtggcgattttttaattcaagcatattatttatggtttagttcacatatattataaagtcatagcctagaggatctcaaaggattttttaagtgaaatccacactaattgcctcagtgaggctcagagttcaaatggcttgaactccttggtatttctatagtgtagaagcatagaatactagatatattaatgtgactttatgttatgaaaaaaaaagattatctgtcattgtattagtttgttctcgtgctgctgtaaagaaatacttgagactgggtaatttataaagcaaagaggtttaattggctcatggttccacaggttgtataggaaacatggctgaggaggcctcaggaaacttacaacttacagtcatggcagaaggtggaggggaagcaggcatgtcttacatggctggagcaggaggaaggttgtgtgcagaggtggtacgcacttttaaacaaccagatcttgtgataactcactcagtatcacaagaacagcaccaaaggggaaatacacccccatgattcaatcacctcccaccaggccccacctccaacaccggggattaccaatttggcatgagatttgggtgaggacagatccaaaccttatcagtcactaatccagaaatttttttagcatttaattgatcaagcttttcgtagtgatcagtgataattgatttttgtaacataaaaccctagtatgagtacaaaatcctaattgctttcaaagttaattttttaaatgtacaaagatataagctaaatcatcaaaagctaaattatgttttaatagttacaagtataattttctagttcatacaaaattagcattttctaaatgctaatagggttttattaatgttcagggtaactttatattcctttgttgtccactgggtgtcaatatgataaaatgacattgaataaatagcaataaattaaatatatttacagaaacattttatcaaattaagattaaaatctttattatgaacttaagacttgaatttgtctttctactttccaggtatagttagctattcctctctttcattcctttgctcatggttaggaattcagataggcatactgacagggatttctctgacatctggtcttcagggattctgtcttccttctcgtttcagtctatgtaatacctaaacgataccaattatataacttactggattccaaattagcaacaatgtatttagccagaggcagtgttaagacttactttacttgttattcgatcccccagagtaattctgtgagatgtaggaattagtaatcagtataccatcccaatttttccaacagagaaagccaaagcttagagtatcttcttttagtgcaaatgagctagagctcaaacctagattctctataaattctatatttttaatatttttaattcctgtaaacatgtattttctgtcttagagaactttctaatgattatcaaatcttttattccacatactatttcttatgtccttagaaaaatatctattttgctctgttgttaagagtgtgtgtgtgtgtgtgtgtgtgtgaattgttttctttaattctttttcagtgtgtgctcacatttgtgtgtccatacaaaagtttggaaacagagaagtaagaaatattatttggacttgggaagagaaacattttaacttgaaagatagtataatggctctaaaacctagatgcataccacagtcactaaagagactctccagagattctgtaggtcaggaatctttaaaaaatatatatatatatatatgcctccagaagattactatagtgaagattctcaggttagtgtttggaaaacactcagtgaaccagaagcaaacatttctaggtcagtaaatttctggccccgccttcatggattatggtctccatagaggactttgtatttttaataggcacattggatgattctgtgatataatctatgaaccacactttaaatgttgttgtagctttaaaagtcctgggccttgtgcttattttacactgctctaacttctaattcaaactttgctaccagagtctttttcatcttgggcaaggtactctcagcctcagttttcttatctataaaatgagatcagatcttatttttgaggaaaacacaaatgagtaggtatgattatttcaatagttgtgtcaagcttaagaaacaacaatgtaaagatattatttaaattcattaaggctatgcttcatgtcagacaaaatatattcatgaacatgtaaatttacaaaaagacaatttgaaggaattatttgtgttgtccaaatattctttcctttacaaaatgaattacaataaaatcttattaaactaagcttccctaatgcttttaaaatgatattaaaattttgctttatgtatgatttttcaggtatacaaatgttaaacaaaatactagcaattgactgcttccagtggaaagataatgaggaagaatgaaatacaccctttaaatttttgaactgtggcagaatttgttgttaaacctagctccttcatgaaatacagattttatactttttatgtttaaaaattgtatttaaattaaaatatactttacctttttctcttgccttctacttcttagggccaagaagcaatgatatgaataatccaacttatgttggatttgaacgagatgtattcagaacaatcgcagattattttctagatctccctgaacctctacttacttttgaatattacgaattatttgtaaacattttgggtatgtatagattttactgattttagttcattttgttaaagttttcaactttcttataatttagaagatctaaaaccataggtaaatataaaggtggcagcctacaaattattttaaaattcagtgaaataaggttccgaggttactcatacttccgcccagccaactaccaattcgggacttccctcaaccccctaccagactcaataattcactacaatgattcacagaactcagaaaagcactttaactatgactattagtttattataaaagctagacctcaagaatagccaaatggaagagttacacagagcacggtatgagggtgggggtggcacagagtttctctaccctttctggtcatgccgtgatcccagcacatccatgtgttcactaacctagaaaactccctcagcctgcatgttttagagttttaattgaagtttaattaccaaggcatgactgaccaaatcattggtcactgttgtcaattgaactcaatctctagcccctttctcctcccacaaggttgtagttggtgatgaaaattcaaaccatggccggccctcagttaccttagcatgaactcagatacgctgaaataggcttgttatgagtaactaaagacttctatcattcaggaaatttcaaggattttaggagctccataccaggtaccaaggacaaagatcaaatatatgtattttattataccacaattatcttatatttatgaggtttctagtacttgcagactgagaacagattttttaaatgtattctggctcaatccatttaattaggctgttgaaataattttttaaagttatattacaaatgggaaaaccactcatctgtcttgcacgtttgtaaccgaatgttgcatgtgtcctatttaagtggcttctgaattaagcaactactgtgtatactatactaacaatatatactatagtaatgctttattttttaactttactattgtttttgttttatttttgtccactgtcatacagttgcatcttaatttttgtttcatttcctggtagttgtttgtggctacatcacagtttcagatagatccagtgggatacataaaattcaagatgatccacagtcttcaaaattccttcacttaaacaatttgaattccttcaaatcaactgagtgccttcttctcagtctgcttcatagagaaaaaaacaaagaagaatcagattctactgagagactacagataagcaatccaggatttcaagaaagatgtgctaagaaaatgcagctagttaatttaagaaacagaagagtgagtgctaatgacataatgggaggaagttgtcataatttaatagggttaagtaatatgcatgatctatcctctaacagcaaaccaaggtgctgttctttggaaggaattgtagatgtgccagggaattcaagtaaagaggcatccagtgtctttcatcaatcttttccgaacatagaaggacaaaataataaactgtttttagagtctaagcccaaacaggaattcctgttgaatcttcattcagaggaaaatattcaaaagccattcagtgctggttttaagagaacctctactttgactgttcaagaccaagaggagttgtgtaatgggaaatgcaagtcaaaacagctttgtaggtctcagagtttgcttttaagaagtagtacaagaaggaatagttatatcaatacaccagtggctgaaattatcatgaaaccaaatgttggacaaggcagcacaagtgtgcaaacagctatggaaagtgaactcggagagtctagtgccacaatcaataaaagactctgcaaaagtacaatagaactttcagaaaattctttacttccagcttcttctatgttgactggcacacaaagtaaggctgttgctttcaatgcatgcaatattaactttgagtgtttactaactctgtgttttgcttacctggcttttcttccttgaagttgcttaattttttttcctccaagaggaattatttaaaaagacttttgtctgtgacataaccaagatttattctgtttacctaaggaacttattttcttttttgcaatttcatttattctgagtcactttatttgtaataagtgaagaattttaatacttagaaataagttgtaaagaaaataatgagaatcttaccatgctttagaggaacgtaatttctagaaatagttaaaagatgaaatactaagatattattttaccttctttatatagctgtatatactggtagtatgaaagcaactagtgtcattgatgattttttgggggggtatttttgtattctaggcttgctgcaacctcatttagagagggttgccatcgatgctctacagttatgttgtttgttacttcccccaccaaatcgtagaaagcttcaacttttaatgcgtatgatttcccgaatgagtcaaaatgttgatatgcccaaacttcatgatgcaatgggtacgaggtcactggtaagttgatttcttatagaaagaataagtctgattcataaaccaaaataacaaaaccaaactacgtaaaagtactactcaagtgatgtcttagtcttaaagtgctagattcttaggttggaaaggctctttaacctttcctagcagcagaattttggtgtattaatcttttgtgcacactctgttatactttcacatgctgatgttaatcctggctaaggactttgcctgctcattcatcctgaatcacttcatagtgattgaccagtcagaccacgttatgttgccttgtgccaattctgtttggtggataaggaagaagaaatgtaggtactgttgaaagcctaaggagactataactgtggacgcagagaactaatggaacttaatacagtaagtcagtgtttcagagaatatagtaatggaaaagtaggtcatcgtggacaagaagttgggaagcactattgccaaacagccttaggctccttgtgaaaatgaggataagggcatttatatgcagacaattgattggaaatgaactcttgaaatagtatctttaatctctttctttttttttaagtcaccacttcctcaaaatgcaacttcaatttacaagaggttcttatagcaaggaatccggagttatgctttcttccacgcgttattaaagatagttctttaacaatgacagacctaatataaagaagaagaattattcttgagtaattatagcactattaaaaagctaggaagtttatagaggaagatgttttcagagacatgactgggaaggtgataattttggttttgcacttttaagatttgaagtcataggacctccaagagaaattgaaatttgtccaacagaatgttggaaatatgagccaggtgaagaaagatcaggggagaatgcaaattgatttggtcatttacatagggatagtacttgaagctatgagagtagatgagctctacaaggctaagagtgtgaagaaagagcaaaaggctgaggtctgagccatggaaggagacaggaaaccccaagtgatgtgtaggaataaaactaaaaatgtatcaattctataaatattcggatcatctactatgtgtgaaatatttaaaacaattctgatttctaagtattttagaatgaggggtgtgtgtgtgtgtgtgtgtgtgtgtgtgtgtggtgttacagttagagggttgcatagatataagtgaaagtaacgagagtaataagtgagagtaatcaattttatcccaggatttgaagatcccataagatggaattgaaaaatgtgtgttttaaattgctgtctaaagactgacagaataaacatttttaaaaactattttccagcatttcaaaagctaaatggcatcagctttgcaaccacttatgaatagaagtgttctatatgttacacattctcctggtttgtgtttttctgtgggattcatttaatgtaattagttattgttctctgacaatctttaagcttaagcaacatatatatgtggtattaatagaacctatggtgtttactgataaaattgtgacaaaattgtagaaaaaccaaagccttttataattcttgggaattacattaaggatatactttttttttttttttctggttacacaggatcacgctctgtttcccaggctagagtacagtggtgtgatcacagctcactgcaccctggaattcctgggctcaaaaaatccttctgcctcactctcccaagtagctggaaccacagtcatgcaccatcatgcctggctagttttttatttcttcataggtatagggtttcactatgttgcctaggctggcttcgaactccttgcctcaagtgagcctctcacctcagcctcccaaagtgcttagattacaggcatgaaccaccatgctcagccatggaaaaactttaaaaaggatttatgtataatcaaattcttacatttctaactgtataaatcgttgtcctcatttttaaactgagggctgcttaccactttttcccaatacttcacataatgctacctggaaattaccgatattctagtttgtatgcaaccttagctttttaaattcacatcttttaatatttttctagatgatacataccttttctcgatgtgtgttatgctgtgctgaagaagtggatcttgatgagcttcttgctggaagattagtttctttcttaatggatcatcatcaggaaattcttcaagtaccctcttacttacagactgcagtggaaaaacatcttgactacttaaaaaagggacatgtaagtattgtgagtcttaaaattctctgcaatagtcagttgcaagtggcaaactcatctcaaaatagcttaatcaaaaagggagactttatcagctcccataaacaacctctaaaagtcaggaatgtagacagaatctgggactcaaatagctatatgactctttccatccctccatctcttatttctgtgttgatcctgtgtttgacaatggctccttcacatgatgaggaatgtggctagttgaagttcatgagttagagccttacatttgcaattcaaaggaaaaagagccattcctccgtctccaatttaaaagctctggatgtagactcttagcatagttgaggttaaatatgcatcgtttaggttgttaagagtgagtaggatggagatagggccttactctgattggttctacacaaaggagaatttattcttcacaaaaggtgaaggtagaggggtaaaatgggaaggaactattaaaagaaggagagaaggaatactgagcagccaaaataacagacatctactgtattctgtctttggctgcccaacacatgtttatgtttttcccatacataccattctaatattgccctggcttataattataactatctcctagaatttctttctcttatcagaagatgttagaagctctgcctatgtccctaggcctcaaaaaaaaaaaaaatacatgaaaactaaaaatatttcatttcagtaaatatgctgatcatctactacctgcactgtcagaacattaaagtcttaagatgaattagaataacacttagattgttattttatagttaaaagaataaaatccatagttaatggtaataattataatacctgtctttatttaatgcttattgtgggctgagccctttctatacattttcttatgtaatttccattttaatgatgaagaaacagaccaagaaaagttaaatacattgttgaatgctacaaaccaagtagattatggagctggggtttagaacctactgacttacatacctctactgcataatacatagtttttttaatggctgaatgtttgattggtggtaaattaataggtgctagatcccatcaaaagaatactttatcatataagaacatgaccagaattaacagagttatatcattttgatcactacagattgaaaatcctggagatggactatttgctcctttgccaacttactcatactgtaagcagattagtgctcaggagtttgatgagcaaaaagtttctacctctcaagctgcaattgcagaacttttagaaaatattattaaaaacaggagtttacctctaaaggagaaaagaaaaaaactaaaacaggtaagagaatgagcaagttctcaatcacgtaaatattttctaatgtgctgttcctggttgttaataacatttagaatctactttcttattttaatattttagattttaagtttgagttatatagactatatattatgatgtcttgtatatgtgcgttaacctaaaacatgtgagtacctacctgattttgctctttatcctgaattttaaaataataccaacagtaataatatatactctcctttttcactggtattttgtataattatagcttggattagcctgggaaagcaatttataaggtatggatatgtatctttgagtgacttatcactgttttagaatttttagctctgaaagcccagtagccacatgattttggcatgtctaattctaagtctgagacactgaaagaaatatgaatactagatgcctatgcccttcataggttttatcagtgggaaagaagatctggaatttagggggagaattaacatcggaagagaaagaatcctaaaatgttaatgttaatgagatctaagagatcttatagtattcacatgagaagagagagggaaaggcaaggataaaatgaaaggatactaatctctatactacgtctttgagaaaaacactgaattcttataaaatgttgagcactgcttcagcttgggaaataatgttaaataccttctaatttctcacctcatttttaagtttcagaaggaatatcctttgatatatcagaaaagatttccaaccacggagagtgaagcagcactttttggtgacaaacctacaatcaagcaaccaatgctgattttaagaaaaccaaagttccgtagtctaagataactaactgaattaaaaattatgtaatacttgtggaactttgataaatgaagccatatctgagaatgtagctactcaaaaggaagtctgtcattaataaggtatttctaaataaacacattatgtaaggaagtgccaaaatagttatcaatgtgagactcttaggaaactaactagatctcaattgagagcacataacaatagatgataccaaatactttttgtttttaacacagctatccagtaaggctatcatgatgtgtgctaaaattttatttacttgaattttgaaaactgagctgtgttagggattaaactataattctgttcttaaaagaaaatttatctgcaaatgtgcaagttctgagatattagctaatgaattagttgtttggggttacttctttgtttctaagtataagaatgtgaagaatatttgaaaactcaatgaaataattctcagctgccaaatgttgcactcttttatatattctttttccacttttgatctatttatatatatgtatgtgtttttaaaatatgtgtatattttatcagatttggttttgccttaaatattatccccaattgcttcagtcattcatttgttcagtatatatattttgaattctagttttcataatctattagaagatggggatataaaagaagtataaggcaatcatatattcattcaaaagatatttatttagcaactgctatgtgcctttcgttgttccagatatgcagagacaatgataaataaaacatataatctcttccataaggtatttattttttaatcaagggagatacacctatcagatgtttaaaataacaacactacccactgaaatcagggcatatagaatcattcagctaaagagtgacttctatgatgatggaacaggtctctaagctagtggttttcaaactggtacacattagactcacccgaggaattttaaaacagcctatatgcccagggcctaacttacactaattaaatctgaattttggggatgttgtatagggattagtattttttttaatctaggtgattccaatattcagccaactgtgagaatcaatggcctaaatgctttttataaacatttttataagtgtcaagataatggcacattgactttattttttcattggaagaaaatgcctgccaagtataaatgactctcatcttaaaacaaggttcttcaggtttctgcttgattgacttggtacaaacttgaagcaagttgccttctaatttttactccaagattgtttcatatctattccttaagtgtaaagaaatatataatgcatggtttgtaataaaatcttaatgtttaatgactgttctcatttctcaatgtaatttcatactgtttctctataaaatgatagtattccatttaacattactgatttttattaaaaacctggacagaaaattataaattataaatatgactttatcctggctataaaattattgaaccaaaatgaattctttctaaggcatttgaatactaaaacgtttattgtttatagatatgtaaaatgtggattatgttgcaaattgagattaaaattatttggggttttgtaacaatataattttgcttttgtattatagacaaatatataaataataaaggcaggcaactttcatttgca

SEQ ID NO: 2 - DNA, 20158 bp, Homo sapiens
  gene (1)..(20158): Also known as IMAGE:4081483
  ref <308>: DATABASE ACCESSION NUMBER: GenBank/NC_000011 REGION: 58631286..58651443
  ref <309>: DATABASE ENTRY DATE: 2008-03-03
  ref <313>: RELEVANT RESIDUES IN SEQ ID NO: (1)..(20158)
aaatccagagcggcgggcactgacgggcacttgcaccgtgtggacagactctccggttctgtgagtggtttttcttttcccgggtcggacctggagttcttagggggatggctgacaagggcagtaggcagaaggacctcagcccaaagtcaagggggttttggatggggagctgggcagccgcccgttgtaattcccttccccctgtctcagcttcaaaggccaagagttgtactcctgaagagatacttagagatcatctgggtgttcctgaatctcgagagggtcgtttgaccctggtgggtcctttccctgcccggtgccgttcgcgcccatagaaggagaccaggttcggttaagcagagcagaaactattcactgatcaaggaatggagtaggagagctcctgctcaaagtgcctggagtgtagtgtgagggtgcttcttaaggtcttttagggcaggtagttggaaagcaaggatttctggaaagagacggggctttccagaaacagctgagtgtggcagtctcctattttctgttgccacccaacactacatgtgcctagcaagctgcgtttctccccgaggcacagattgaggtatggtaatcagcaaggattcaggttagggtagcgcttctaagttcgtttcccatcttgtagcacggtggttactgacatccagtctctgtttctgtaagcaagcacagcttcaagcacaggttaccttcataggttctggggctttaggaaagcattgaggtcatcctgcggtgacagaggcagctgttcaaagaacttggtgcgcctttgaggcgggggttgtggagtgaggcaggtaaaaatgcagattccatagccacaccccgacatactgaatcagagtctgtgagggtgggatctggaatcctttttaaaaagcttagaggaaccaattcacacgaacaataaaagtttcatctgagccaaagtccttaatctagaaatgaggaaatggggatccctaaaagggttacagggagagggttggtggaaagttagactatgacagttttagggtggttctttcctggccttggaaagttttctcagctgctgctctgatcagtacacagctgaatgctttaggggaaccctcttcatatatccagagttccctctctgtgcaggtctcccaccatgtctttggcctgtgacctcttgtcaccttagtctctcagctttgtctccttaaatctggaattcctactggttttgtcttgctgcccttccttgccacactggcctggaattcctcaaggtagtctgctaaagtggattataggatacatttcaattgtcactgtccttaattgcataatgtccagttccttgcaaaccattgtttcatatgttttgctcttttttgttttgttttgttttcatactagggggaaatccagtccctgttactccattttggccagaaattcaaggtaatgacttttaatgtttctgactgctagttctatcttctctctcacttctggacctgtctctattcactgatatttctagtcattatgggtcatatttatccactttttaagtgcctgctgatttttttattagatatcaagctttgttaatttcacaactttgggtgccagaaatttttacattcctatcaatattcttgagctttgttctagtatgttcatattttacatggaaaccattttatactttcgaagcttgcttttatttattaggtgggagcagaactagggctaattttgtcctactgcggaagaaataccttgcagagtagtctccctgatacttcatgaattatgaagttttctagtcggatttttgggaattgaaattatacacagtcctgtatgagcctcagaaattgttacatctgcttcttttgggtacttcttttcctgttccttttcaacagtttcgttccactcatgcattgaccaagctgaaatctcaagggatacccactgcagatctctcatactgtgtgctcctgtggctgtcttctccctagtactctgtcatacaagctccagtcatcttggcctcccaaaactccttgcttgtcttctcaaatcagggaaactactagactctgcctgtttctccttcctaagatatgccttggaaactccatacagtaagctaaatagccatagggcttacctcatatgattttcttctcagatatcagagatgaggtcccacaccacctgatctccagtgtttgaaagtggttatttcatagatcttgtttttttggtttttttagacatttcaggtggcagaataaattcaatccttgtttctccatcttatcgagtagtagaagttagttacattctctttgaactcatcatgaattccatgaagactgaagaaaacaagtcatttagcgctatggaagatgaccagaggactagacctgaagtttcaaaggtatatctacttttttacaactcctcagaggagtgatagtctaactatagtgccatatgaggatcttggagataagttcttaaacaatggtcgttataagcccttctcttaggtagtttaaaatatatttggggagctcatacacataagtgcttgtggaaagcaaaatgatagagttaacaatgctaaacgtatgttaagacaacaagatgactaacaaacaatatagacacttaaagtcttggaaagtgtagacaggcaaaaataattagctaatgttttctgaggaaacactgtgtgcctagaattgtgtcccatcatatgtattatctcatttaacacttaatagaactatgcagtaggtattattatcatacttattttataaaagaagaaactgaagctcaacttgcttatagttgcagaagtaatggacttcagagcaaggatttaaacctagtccatcagactgcagagactggtttttgacccacactattttgctcaaaatatgcaaaatgataatacaaaattgagacataaacaagtgattttagagtacagagagaagaatgcttaattcagacttaggaaactacagcagcgtcatatgagaaatgatttattaatgaataataaatctaaaattgtcaaactcataggtgtcgaagtggttgttgggctgggaatagagaaaaatggaggtattagtcaaggggtacaaagtttccttatacaaggtgaataagttctagggatctgtacagcatgggtgcctatagttaataacactgttgtatactcaagttcttgctaaaatgatagatcttatgttaagtgttctaattacaaaaataataagagggcaggaagagactttgggaggtgatagataggttgatggcatagattgtggtgataatgtatctccatactcatcaagttgcatacattaattatgtacattaattatgcattttgtatgtctaaaactaagttattttttaaaaagaatgaataacatttcactagtgtatcaaggatgaaggaatggcctaagtaaagtcgtgtacacaggaaaacatatttggggaacaggatagctgcatttgatgctttataaggagaattcaagaatatggtaggcaaatactgttttctatactggtaaggtagtatggtgccaagatcacagtaggctttatatcaataagagctttccacatttccagtaaaaatattttctaattgtgaaacaataaaatggattcgctggttcacatgagtggacattccagaattcagctgagctcttaattcagtggtatacagtttctttaaggacttgtttgtgtgttcagtctctgtgttctgcttttcatgttatcccctggctggctttctgcatagtgacaaatagagctgcagtaatatcagatgctttactctccctataatgagtctatcctggtttcctgaggaaacttctctttgccatctaattgtcccaacttaagtagctcacccatttcaacacaaaaccttgtgactgagagggcacatatagatattcttaagctgtcatgaattcatttccatacgtgtatggctcctaaaaagtgggagagaggtagaatagctttctggaaaatagctgcagtatcttttttttctttgaattccatgtgtaggtttttggatttccttctgtaaataaaggagatgtgtttacagactttatctttgtattgcttaggaggagttattcaattcacttaagactttgttaagttaaatattaatgttaaaatgattagggctatttcgttcaagacaattgccactaatcacatgtgattatgtaaatttaaatttaaattcaacttaactaaaatcaaataatgaaaaaggtcaatagtacaaattctcagttatatcacgtgtcaagtacttaagaaccacatgtggctgtggaattagacagtgcagatgtagaacatttccgtcactgcagacattctattgggcagtactagtctagggcatccaattatagaacagaactagagtataaaactgccaaactgttcgtctagaaaatagaatgagagggaaaaatcaaagtaaaggaggcaacaaagcaagggaatataaattcagaaaaagtggcaaaagtagaagatacaaaaaaagatgatagaaatgaacacaaaaacccccacacccaattaattgtcttacagattatttgaaaggctttaacttttattgtttcctttaaatttatgtatttcatatacagtaaaattcagtctttttggtatacagttgaatggcttataacaaatgcctgcagtaatgtaaccatgaccaaaatccagaagcaaagcagttccatcaccctaaataatttcttgtgtggttccatcactctatataatttcctgttctccccacttgtgccctattcatcccagtccctggcaaccactaatctgttcattactctagtgttaacttttccagaacatcatataaatggaacatacactgaatcataccctttgagtctggcttctttcacttagaacattccatttaagattcatgagtgttgcatgcactgataggttttttctttttattgatgagtagcattccactgtgtgaatgtatcaaaatctgtttatccattcactcccttaagaacatttgaattgtttccagtttggggactttgtatataaagctgttgtgaacatttgcctgcaggtttttgtatgaagattagttttcatttctcttgggttcacctagcagtggaattgctgtcatggaaagtgtatgacataactttaattttataagaaattatcaaaatgtttacaaaatggctgtatgatttctcatcctcgttaccaatgtgtgagagttccagttgtttcatattcttgtcaacacaaagtttttctgatttattcattctcataggtatgtaatggcatcgttttgtggtattaatttgtatttcactatgactcatgatttgagcatcttttcatgtgtttatatcatccacatatctttggtgaagtgtctattaaaatatttttcccattttatacttgttagttattgctgagttttgagagggctttacatattttggaaacaagtcctttgtcatattgcttttctcataatatttgtgataattcctgatattttatctctgtgtggcttgtcttttcatccttttattcctgtttcgggagggaaaagttttcaactttgatgaagtccactttctctatatttctctttgtggatcatgcttttgcttttacatcagagaactgtcctaaatctaagatcacaaaacatttctagttttcttccagagttgtagttttaggtttagtctgcaattgattttaagttttatttattttttgtatggtgcaatatctggatcaaagtttgtgtgtttgtgtaaattgtgtgttgtgtaaaaaaattaacacaattgtggatgattagcatcttaaccatgttgagtcttccaatcttgaacaagatatattctccatttattttggtcttgtttaatttcttttgctgtggggtacctgggagaataggcaaacctggtggatgaaggcagagcagggagtgggtgattgaaggggcaatgtgactggtgcattattctctccaaggccaccagacaaggtgagaactagaaagatcagaagtacaaggcacaagtgacagaggttagtcatcctgacatcatgcagctttaagattgtccagagaactgtgagtggctgctattacctctgggtctctggagtatgtcttgcccctttgacgagaaacccttgcttcctccaccctacataaactcctcaaaagagaaacctctagcactggaatctccctccccagacaaaagctctgcacagatggagtcacgtctctatcagcgtcccccagacttagagtcccctggaaactggatggtcaagatcataagttattgggacttatgtatgccagatgcaacagtctgcccggcacattagacacatcttatgggagtctcaccacacctagagggaagtgttttccaatttgacagaaaacagaggggaggcatttgttcagaatgcatttgaaacctggcccctcggcaaactttactgaccagcttctactttagggactaggcatgtgaaagaaggacagagtcccagctcttgtgaaccttacattttaaagagtgaaagagattatccaggaaacagacaaatagaaagttttcgctagtggatcaagaacatacaaaggtaacagaaagtggcaagtgtgtgccttggagtgctgctccggctagggaagtcaagaggcctctgaagtggccctgaagacacccaagggaaggccagacagaatggtgaatgcacaagccctgagaatggctaaggcttcctgtccagggcctgagtgatcactgtagctgggaccaaggggagaggagctgagcagcagaaggtggggcagagggaggggtggacaggggccagaacactctagccccatgggccttggaaaagaggggatgggaagatgcttgaagggatagaagagttgagagtggaggctattccaaaaacatccaggctaaagaggagggggcctgcagtggcctgagactgggagctgaaggggcagagaggaggggatggagtggatgagaggtgtgaaggaaaagagagatggagaatgtagggcttaaactgtggaggccagagagggagcagaaatgacaagtaggttttgaccctaaaacccaagcaccttagcactgacaggaacttcgcctttttcttccttgtctctaattggccaggacagtggtgagtacatagtagatattcattcaatcactttgatcatttattcaatgaacatttcttgcaaacctacgtgcctggtacgtcacaggtaccaaggatataccagtgaatacagtggtatccttgttctcttggagctgacactgtagagggagaaaggaaaaataaattgtgtgtgtttgtgtgtgtgcatgcacgtgtgtgtgtgtgttttgatatgggcagaagggaaaagagaatggcggaggctgttttggaagtgatgataattggcttctctgataaggtgatatctgagacctgaaaggagtgaggaggtgagtcctagatggaaatatctagaggaacaacattgaagatagagaaaacagcaagtacaaaggttcagagatgggagggtgcttgttgactgaccaataggtctagtgcttgttgactcactaatcagtacctgtgtcccttccattagacttggaattctctaaggaacatgcctgggttttcctcatcagacaagaggggtcagagaggtgggatgggggccactttctctctttctttatgctattcttctttccccaatcctggccaggcttagaagtaggggccagggaaagacaagggttgagtctgttacaatctggagaaaagttacagaaagtcaaggaataggaaggttctgtgctgttccagaacccactactcatatccatgctgtttctgcttttaacacctgcaggtcccaccctgtcatccagttccccatctttgccactgttgtggcatccatcacactaaaacacccagcttcttgtgttaccagccacaagtttttagtctcccatgcaatagaaattgacacaaggccaagtgagtttcccagacaaggctttattaggggcttattcttgaatacaagggagacagcactggagtgagagttctccagatggctccccaaggagaggtctttttgctgttttaaacatggtgacatgaaaagcatgatgtatgctaatatcattgcatgtgttgggtggagtgtagagtgtgcaggcccagtgagatatcatgttagtacttacatcacatgatcaaaaaatggtggataagcccctccctgggtggggattttcacattataatgaggcaagcaatgaggtaaagtcctgtgtgcatgcaagcaataaagttaactcccttgaatgagatttatggtagaatgcttcttatcttagtttctttaaggtcttacagccagtgaggatggcaccagtggaggtgcaagttctggtagtcagcgggtgtggaaaaatgcattattagtggtggaggcagagtcccgtccctactctgtttcacttggatatttacctcccggtgcattatctgcctctttggctatcttgacaggggttgggcataatctcactttgggaatgctgtgaatgtggtcaattcctgctctgccccaaggcctcgagactgagaaggtacatagaagactccagaatcttagaatctctactcagattccacctagactcttgcttgtgtcctgggccttagtcacttcctccttattattcctcagtcatttctgcttctctaggtaacttgctgacagaacatgttgctctaaattctgctgattcaaaactcttttattcttaccaacaaagagtaacaggcatctccaaatatgcctgaccacacatgaactcttacaacgcatacagtgagtgcagattacccaatccaataatttattctaattttaattctagacactcccctcctggtaaggtgaaattctgtgtcccaaaggccctttccacagagcattctagggctcagtgaagggacattcaaaagagccaggtcctccttttccatttgagcccctcttctggagcccagagctatagagggaagagtgactggcttctaggactcttaactgaggagaaggcagttgagggccatcaaggaaaggcctcagagtagacaggagctaaggtagctaggcctggtcagctgtcctttgccttaagtcaggggttctcaaagcctggaccctaggatggcagaatcaacacaaactgcagcctcaacccagatatattaagtcagatcctctgggttagggctcagcaatctttgtttcaagaaacccccaggtgattctgatgcagaatggtggcaagaactcagacccagactgggactgtcaggcaggtggagtcctggctctccagtagactctgaacgtgagaggtcatgggcaaagcccttctggacctgggcatccctttctccatttgacaagccccaggatttttaccaggtctctgaggcagtgatagaatcaggtgaacatctcaatgggagatgcacacacaattgtaaccttacccctttctcacttagagggaaaacaaactacgtgcagttgctttgaatgtctttgggtaaagtcacaggggagctgcctgccctctgaatgagccagatatttcatttaccctatttagttagagatcttgctataccttaagcagaaaacccaccatcactaccacatactttcccacaaccttggaaaggaagagacatgtttgagttggaatttgctatccctagaccctccttccacttccactcttttttggcatggggacttttctgtactgcctccttaggaactcaggtcccatcaaaatgtggaaagaacaattacatttgtttcgcacatttgcttttttgatagtttctgaggagagtaggaggagggcaggtttttcaaggctcctttagggatgcaagtatgattaccccaaaaggttccacccccttcacacttatcaagggtccccataagagcctggcctttcacatatattatctcacttaccaagcacagatcagagatgttaaacaagtagcccaaggtcacacagtgggtggtacatgtagcagagcctggatgtgtgcttcctccctctggaccctaccacctccctcagaggtttcacagggcaagctgggactggcactgaatcctcaggccacttagtaccctgtcatggccctcaaggaatccgcaccccaggcaaagccttcttctgaggtttgggagtgagagagtgactccccaatcttcctcctgttaccagtggagggtcttgactaaaagttgtcctggttcctggcattttaaagaaaaacttagtaaaaacatacaaacaaagcagcaaaagaaagaagcaacgaaagcatagatttattgaagtgaaagtacactccacagagtgggagcaggcttgagcaaggggctcaagagcactggttgcagaattttctgggatttaaataccctctagaggtttctcattggttaatttgtttacaccctatgtaaatgaagtagtggcccacaaccagtttcactggttgcaggagaggaccaactagaggtactttccatgtttcatctgcaatgcagtggaaagcgggagttgggggcataatttgcaaaaaggaggagcctctgatccttttgttacttgactgtggagaggtggaattttccttttgattcagttccaggaagtgagtgtgaatcatccttaggttccctgcctccaggtcctgttcttctgcctcactccttcagacctggggcatccctcttcttgccagcctgctcctccccttggttccaagggggctcctgaaggctgcatttgatcactcagcagaacctgaagtggggaaggcagccaggtcttgtttaatttcctacaatatattttaggacaaaagtcttgcatatcttgtcagagttttcttcatagattacctgtcatctgtgaattaagataattttactaatttctttctgatccagatgccttttatttctttctgttttttattgcactggctaaaacttccatcacaatggtgaagagattctgccagagcaaacattcttgtgttttttctagtcttgggaattcattcaatcctacacgattaagtatgatgttacctgtaagtttttcataactgttcttcataagattgaagaagtttccttttattcctaggttgctgatattattagaaatagatgtcaggcttaccaaatactttctctatgtctgttgagatgattctgtgtatatatagaaattttaattattctaattggcttattacagtgatatatttttcaaaattaaaccaaccttgcattcctggtatttacctattagttcttgcatttatgtttatattggtctgtagttttcttttattgtaatgttttgcctgtatattacagagctaatatatccctattgctgaggcaatgttctttttagtattgtactcaatgcctcacgaattatgatgttttccctatgtctggtgggaacagcaactattcccagccctgtaagatctccagggattgttccttctaatatttttgggtagctgatttccctgacttaggtgatttcctcacatgcatgtgcggatcactagtcatctgaagacttaatggggaccctctctgtacagtcctctcatgccctttgaaagctaaacccattggcttcccagaacttggttccttttcctcaactcagctgctactgagcgttgcctggattattttccctgcaccatggcctagaacctcttttcaggcagtaagctggggcagtcatagagtttgcatcattgtttttccgtttctcaggtgtcactgtccttctttgactaatgctcaatgtcttggaaaccattttgtatattttgtccatttctccaggattttcaggcaggagtgtaaattagttctatgttattccatggtggccaaagtagaagctcaggatgctgcttttttttatttttccaaaggctttagttttaattagtggaaataatgggctataatgggcttactttatcttggctgcccctattactatcaaatacataaatataaacataccagaagttttcttagccagattaagagcatcttcaaaaatctcacagggaatatcatgttaaataatgaatcattataagtatttcccttataatgagggagaatagaggagtgctcactattactgcctttatttagctggtaaataaaatttaatttagccaatgcagtgtgataagaaaaaatagtaaaatataatatttgagaattgaaaagaagggaacaaagcatattcatgaaatatccacagatggtatcatatctatttttgaaacaaaaaatatttatagataaaatattagaatgattgtaaagtagcatattggctagggttaaggttgatatttacaaaacaatggatttagcttagtcagcaatatcagaaaatgtaatcatcaaaaattattttataatgcctagaaaaatattatttacctggaaataaatgtaaaaattatttgttaaccatttatggagaaaattattttgctgaaggcatgaaaatgagacataaatcaatgtcaagatatactaatgagtagaaaaattcaaaattaagacaatatttcatgaatatacagaaaaatataccattggaatagaacagagagagtagagacagactcacaaatttcaagatgtgacaatatctttgtattagtttgtgctatggtgtgaatctttgcgtcccccacaattcatatgtttaaatcctaatctccaaggtgatggcattaagagatggggctttgatgggtgattagataatgagggctctacataatgtattttcttagaaaagtccagactatgtagtctcttaggggtaataaagtaccactgactgtttggcttaaacaacagaaatgcattgtctcatgattctggaggttcaaagtacaaggtcaagatgtcagcagagtttgtgacctgttagggctgtgagggaaagatctgttccaggactctctccttagcttgtagttggccatgtttttcctatggctgtttacctcatcttccctctgtgtatgtctatgtctgtatttccaccttttctaaggatatcaagggtattggattagaggcccatcctactgcagtgtgacctcatttttaactaagtatatcaacaagaactgcatatccaaataagtatcacattttgaggtactagggattaggactgtaatgtgaattttgaggggacacagttcaacccataacaatcttatgtggcaaaactgacagtacagatcagtggagaaagaatgaacaattcagtcagcatcgctggagtaattagttatccacatgcaaaaaataaaaagtgatacctacttgaagctatgtacaaaaaataattccagattaaaaacttgaatggtaaaagcaacctttacaattttttgaaaaaaaaaaaaaaaacaattatcctgtgaaaggtgttctaatggtataaaaagattaataaacttgacaacattaaaattaactcctttatgacacctgagaatgaaaaatcaagaagaaattcagaatagatgtttaacacatatgatgaataaacaatttgtgtctacaatatttaaaatactcctagaatcaataataaaaagaaaaataatccagtataaaaatgaacaaaagacataaacaagcattttagagactgaagtgtgaaaaagggttcaatttcattagtaattaggaaactactgtttaaaccctcagtaagatgctatttcacacccacaagattggtaaacattaaaatatggataacaccaagctttgataaagacatagaataatgagaactctcatttctcattggtgcaagtgcaaggtggtacaaccattatgttaaataatatggcaatatctattataataaagatgattactcattttctttttctcattgctctcctactgcctcatgtcttcaaatatttattgataaaatctatttctgaagttgagcaattccacttctaagtctatacttgagagacacccttgtagatgtgcaccacgaaacatatttgaggatattcatagcaaaattagccactgcttttattagaaaaaccccagaaataacagaaatattcacaaacagtttgtttcttcagtgaattctaactgtaaaaatggatacagaatttcatcaactagaatgaacctcagaaaagtagtgcaggccgggcgcagtggctcacacctgtaatcccagcactttgggaggccgaggcaggtggatcatgaggtcaggagttgaagaccagcctggccaaaatggtgaaaccccgtctctactaaaaatacaaaaattagctgggcatggtggcatgcacctgtaatcccagctactcaggaggctgaggcagagaattgcttaaacctgggaagtggaggttgcagtgaaccgagattgtgccactgcactccagcctgggcgacagagcgagactccgtctcaaaaaaaataaataaataaaataaaataaataagtagtgcaaatcacagaagaacatattcagctggatctgtttatataaaatcaaaaccagcaaaatgaaacagtgtactatttatacttttactacatatgtatatgtccctaaataagtgtaagacaatgataattttaaaacaaattcagacttagtggttgtccatgagaatgagaaaggaagataagatgaaggagggacacactgtatgcctctaatgatttgtagtgtgctatttcttaggttgggaagagatacatggatgtttagtatatgaaatatagggtgtcataaaatgtttttgcatgcataatatgttttacagttttttaaaaacacagtatatgagaggtaaaggaagaagctgaggactattcacaggatactagcttgagtagtcaaatgtgtaatgacaccattatcagattcaagaacacaggaagaggggcacaattaaattttatgactctggttttaaaggggctaagagtgaaatgcctctgacatatccaagagtagatgtcaaagaggcaacaaaatattaatatctggagcttagatgagaggtcagtgctgcagagatagatttgggcaataagtatatgaaaacatgaggtgataggagagccccaagacgaaaaggaaatcactattcctaagacctaagctcattccattgcacctacctactaaatgatccaagccgagctgtacctcctgattttactctctccaggcttattcctctatttatatagactagatccaatacttcagacttcacaatgatttccttccaagttatgttgactcttgtcatataatattttttacttatgtttttcatttctgttgccatcagattctcaatatcttgtatcctgggctactaccaactgattgtatatgagtatttatatttatttatatatcccatcctattatttatctgccattttaatatattttcttagtgctgtcaaaaccattgacagaacagaaactaaacagatttttaatgggaatccttgaaaggtgatctttcaaatatctaaaagataagtaagtccaccttcactagtaagtgaataaatgtacattctaaaaacagtcaaattagacagaattttatctatcaattggcaaatatttaaaatagtaacactcaaatccttttaaggaatcaaccataggattgaggttggtctccttgagcagctggagagaagagatggggtgagttgatacaattctctggaaggcagttaggcagaatatatgttgcaaaagatgtttacatcctcagttgcggtatttccactcctgggaatatgacctagggaaatattcagatgtgcacacaaaaatgttatgtttgtaggaagttttgtcatatttagaataagaatctggaaataatctaaatattcagcaatgaaaggatggattacaaattattatacagtgaaatattctgtagcccctcaacttgtggtttcaaagtttgcttactgcacaaagtagtgacacattgcctagtgaaaaataaagtcacatgcatcatagtatttaagaaacataagatttagatctgcatatgaaataatagagggctgtttctgatccatttcaagttaggtaaaaggtaggagtccaactcatttctttgcatctggatatccagttattctagccacatttgttacaaagatgatatttcccccattaaatggtcttaagacccttgttgaaaatcaaagtactacttttaagaatcagaaaacaaaatcaaagtatacagagaaaaaaaattaaaaattaaaataaagtgtagaatgagtatctaaattgatagaatagtgattgattttttctccattattcgttaaccattatattatctaatttttattcataatatctattagttctatcattagaaaaatataaaacattattaaaggtgattcttgttaacctctttaatctttcctttttaaggatactgtcatgaagcagacacatgctgacacacctgttgatcattgtctatctggcataagaaagtgtagcagcacctttaagcttaaaagtgaagtcaacaagcatgaaacagcccttgaaatgcagaatccaaatttgaacaataaagaatgttgtttcacctttacgttgaatggaaactccagaaaattagaccgtagtgtgtttacagcatatggtaaacccagcgagagtatctactcagccctgagtgctaatgactatttcagtgaaaggataaagaatcagtttaataagaacattattgtttatgaagaaaagacaatagatggacatataaatttaggaatgcctctcaagtgcctgcctagtgattctcattttaaaattacatttggtcaaagaaagagtagcaaagaagatggacacatattacgccaatgtgaaaatccaaacatggaatgcattctttttcatgttgttgctataggaaggacaagaaagaagattgttaagatcaacgaacttcatgaaaaaggaagtaaactttgtatttatgccttgaagggtgagactattgaaggagccttatgcaaggatggccgttttcggtctgacataggtgaatttgaatggaaactaaaggaaggtcataagaaaatttatggaaaacagtccatggtggatgaagtatctggaaaagtcttagaaatggacatttcaaaaaaaaaagcattacaacagaaagatatccataaaaaaattaaacagaatgaaagtgccactgatgaaattaatcaccagagtctgatacagtctaagaaaaaagtccacaaaccaaagaaagatggagagaccaaagatgtagaacacagcagagagcaaattctcccacctcaggatctaagccattatattaaagataaaactcgccagacaattcccaggattagaaattattacttttgtagtttgccccgaaaatataggcaaataaactcacaagttagacggaggccgcatctgggtaggcggtatgctattaatctggatgtccaaaaggaggcaattaatctcttaaagaattatcaaacgttgaatgaagccataatgcatcagtatccgaattttaaagaggaggcacagtgggtaagaaaatattttcgggaagaacaaaagagaatgaatctttcaccagctaagcaattcaacatatataaaaaggacttcggaaaaatgactgcaaattctgtttcagttgcaacctgcgaacagcttacatattatagcaagtcagttgggttcatgcaatgggacaataatggaaacacaggtaatgctacttgctttgtcttcaatggtggttatattttcacctgtcgacatgttgtacatcttatggtgggtaaaaacacacatccaagtttgtggccagatataattagcaaatgtgcgaaggtaaccttcacttatacagagttctgccctactcctgacaattggttttccattgagccatggcttaaagtgtccaatgaaaatctagattatgccattttaaaactaaaagaaaatggaaatgcgtttcctccaggactatggcgacagatttctcctcaaccatctactggtttgatttatttaattggtcatcctgaaggccagatcaagaaaatagatggttgtactgtgattcctctaaacgaacgattgaaaaaatatccaaacgattgtcaagatgggttggtagatctctatgataccaccagtaatgtatactgtatgtttacccaaagaagtttcctatcagaggtttggaacacacacacgcttagttatgatacttgtttctctgatgggtcctcaggctccccagtgtttaatgcatctggcaaattggttgctttgcatacctttgggcttttttatcaacgaggatttaatgtgcatgcccttattgaatttggttattctatggattctattctttgtgatattaaaaagacaaatgagagcttgtataaatcattaaatgatgagaaacttgagacctacgatgaagagaaaggtaaacaagagtcatcacttcaagatcatcagattgaacccatggaatgttagaaaagagatgctgtcttcaagaaaatatgccaataattcctggcaaagatttcatgacaaagacacttaaagcaattgcaacaaaagtgaaaattggcaaatgagacctaattaaatcttctgcacagcaaaagaaactatcaacagggtaaacacacaacctacggaatgggagaaaatatttgcaaactatgcatacagcaaagatctaatattcagaatccattaggaacttaaacagattaacaagcaaaaaaaacaagcaaccccattaaaaagtgggcaaaggacatgaacaaacacttttcaaaagaagatatacacatggccaacaaggatatgaaaaaatacctgatatcactaatcattagagaaatgcaaatcaaaaaaatgccatcacactaatcagaatggctgttattaaaatgccaaaaaattacagatgctggcgaggttgcagagaaaggggaatgcttatacactgctagtgggaaaataaattagttcagccattgtggaaagcagttgggtgatttctaaaagaacttaaaacagctaccattcaagccagcaatctcatgactgggtatatgtccaaaggaatataaattgttctaccataaagacatgcacatatatgttcactgcagcactattcacaatagcaaaacatgaaatcaacctaaatgcccatcaatggtagactggataaagaaaatgtgacacatatacaccatagcatactacacagccataaaaaagtacaagatcatgtgctttgcagcaacatggatggaactgaaggtcattatcctaagcgaactaatgcaggaacagaaagccaagtaccacatgttctctcataagtggaagctaaatattgagtacacatggacacaaagaagaaaacaacagatatggggcctacttgagggtggagggtgggaggagggtgaagactgaaaaactgcctatggggtactatgcttattacctgggtgatgaaataatctgaacacaaaaccctggtgacatgcagtttacctatataacaaaactgcacatggactcttaaacctaaataaaagttta

SEQ ID NO: 3 - DNA, 103220 bp, Homo sapiens
  gene (1)..(103220): Also known as UBE2R2
  ref <308>: DATABASE ACCESSION NUMBER: GenBank/NC_000009 REGION: 33807182..33910401
  ref <309>: DATABASE ENTRY DATE: 2008-03-03
  ref <313>: RELEVANT RESIDUES IN SEQ ID NO: (1)..(103220)
ggcgcgaggcgctctcgctctcctcctcctccgccgtcgcccctccccccgcgcagcccccgccgccaccgccgcgagacccccgcacgccgctctccccccaccctctcctgccccgcgcgccctccggcccctgcggcccccgaagagaacgagagggcgagcgagcgcggcgttcccgggccggcccggccccctcccttcaccatcgccggccctccgccgccttcctccgcttccacctcctctccccccccccaagttgaggccccctccgggggggggaggcccgggaccgggacccgtagcgaattctcctaactccctcgacctctcctctcgcccggcccgagtgtgaggagaagggcccggcccggcctgcgtcgtgtgtgaggaggaccccgggcgggcccacgggccgtgtggggcctggtctggcccgccgggtgtgtgaagaccggggcccggtgctgcccggccggagggcgagcggaggggaggggcctggtccggcccggccggtgcgtgaggactggggcccgggcccggcgccgccgccgccgccgccgccgcgatggcccagcagcagatgaccagctcgcagaaggccctgatgctcgagctgaaatccctgcaggaggaaccggtggagggcttccggatcaccctggtggacgagtccgacctctacaactgggaggtggccatcttcggaccccccaacaccctctacgaaggcggctacttcaaggtaccctcaccctcctcccggaccctgcttccgcggccgaggcctccggctccccgccgctttctgcagttcctgggaccaggagtatgagcacgggcgagtggagggggcttctcacccgtgcagccccctcccccatccctggaggcaggaaggccttgctcgccgagtgccttttctttgtcatgggggcgggggctcgggcgggggcgggagggcaggctgcaccgggaaatcggagagcctctctggttagggtagtgtctacgggcggaggaggccgcctttgtttcccccgctgagggtgggtggaaagagcggtggtctatctgtgctttttcgttctccggtcggaacccctccctgcgcaggctggaactgccccagagggcagggtgacctgcaccgactggattggacttttcttttttggggggtgggggtgggggtggggtgggggaggggcaccagcttgtcatttcagaagctgccgagtgccctgacattttgaggatttgttgggcatcttgggtagtggtagtgccaactttgcattccaatgggtggtggtgaagaatgggaccctaggggtggtaaaaaaaaaaaaaaaaaaaaaaagggtgcccgcgtcgtcttgtcattatccatttgggggaactttaaccctctttccgttcacattctctgcttacctcagtcactggttctttcaaaatgccctttgtcctcaccatgccaccaagtttgccaacctttttttctacaggtagaagtatccacaaagggtggaacgagtcatgtagggagactgatagcttcctactttcagagacaaaattgaaacctgctcaagtggttaactctagctaaaggggtggtctcacagatgacaagtatcatctgaggcgagatcgtttctctgggtgggatgtatggttccttagcgaccacagacattgtttctgttgttttatatggtcttagaacagtggttatcattccagaatctaatgatttttttttaactccaaggtagttaacttggagataatgagtgtttgttttgttttgtttttacttgagtgtttttgcagggaggaatcacagattgaaagtctgaatattttaaatgatgggggcagagagaggaaatgagtgcttaggaatccatttagttttatttttttattttcaaaattaagtaaaataggccagtgagtcaattttagtttggaagggaggggttatcttggcacaagttttaaatgagtatcttagtcatgtagttgtgatgtgtatttttaggactacccaattacttaactcttgttttctacccttctaaaggtggaaacctcagttttatgcttgaaattaggtcaactttgtaggaaatgggattgatacaggaatgtttaatattcactactgtatatagtcactgagtacctaggaaaagcacgtttttagaatattatgtaagtgcggtacccctaccaactgttaggcttcatcttttgtggtcagcctaccctatacttttcagatggaggtatttaaaattactaagaaaacatgcaacttattagtaacaaagtggaaaagatattgctgtgtttatgatgaagcatattctctgttgtcaaatataaatttttatgcatactggaaaaattagttgtacaaaattgaatgtatgtgatacctttcttttttttttttgagacggagtctcgctctgtcaccctggctggagtgcagtggcgcgatctcgcctcactgcaacctccgcctcccagattcaagctattctcctgcctcagcctcccaagctgctgggactacaggcgcacgccaccacgcccagctaatttttgtatttttagtagagatggggtttcaccatattggccaggccggtctcgaactccagaccctgtgatcaacccgcctctgcctcccaaagtgctgggattacaggcgtgagccactgcgcccggccatgatgccttttctgacaaaacattgtttagcaaaatctgctggctaatgttagtggaataaagtttgatttccaaaaagtgtcattgtttggtacaaccgatatttaaaataaataaatgggtactagttagaataatctcactccaataaagttaaaaacaagagcaaacaaaacaaaacaaaacaaaacttgtacatgagagaaaataatgggttgcaagttgtaatatttgtgcataagtctgggaaaggagtgtggagaaccctctctgaaataggaagtatggaaggattccttgtgttaatacactgatttaaattaaatgcttctgaacttcagtccttgtttaaaagaatgatttaatctcgtgctttgtgatgttagatttcttaagctttgagtgtttttacctttaattctgacatgtatgaaaatttgtaaacaggttttatggtttagtcttgtgtgagaagtttgttcgattgtattttcgactactttttcccttatatggccttttatcccattagttgttcattagaaaaaggcaaatttatggtcatgagcagttgacactggggatatgtttaaaaccattgtttttattttactgcttttgtcttaagacaaggcttttagtgtatttcactacagctgcagttgaaagttggcacaaagctttccctaccatatcactcttctcccttattaaatgttagtccttgaacatttagtataatttattttcaagttaaactcttttccctttttggcatagtcattcgtgaaggcagtgggactgccagtcattctttacatttttcatactgtaattcctttaacttttatatattaataggtttctaactgatctttttcaccctgaaatagttggctcttgtctcttacccacaggatctgcattggagatttgtgagacctgtatttcacagaatttttttattcatcctgctttcgcttatttaatatcgccaatccacgtgattcttagttttgggccatatagatgtaggatgggcaaagatagtttcttctgtccattctgaatactatacaatcttttttggccttactatctttttgtgtagtttcttattttgctacctaagcaagtcggaattttattgttactagaaaaataaattgtggatcaagtcagtagctaatgaagacttttaacaagttcaccccctttcttttgaaaggaactttttcagggtctttctctgtcacttagtttggggtacagtggtgtgatcatggctcactgcagcttccacatcctaggctcaagcagtcctcccacctcagccccctgagtagctgggactacaggcatgactacgcccggctaatttttttttcttcagtattgttaagtgaggtagggtctcactattttgtccaggctggtctcaaactcctgggttcaaaggatcctcctttctcagccacccaaagtgctggttttacaggcgtcagccaccatgcccggctggaactatcttttcaaataactcctgctaaggattgtagcttagtgtgggtgctttagtactgaacctccttggaacttttgcattatttatctaaagcattatagcagtgagtctagagccagaaagagtgcctcttttatgatatgcataacaaaaaaaaattttttttttttttgagatggagtctcactcttttgccaggctggagtgcagtggcacgatctcagctcactgcaacctctgcctcctgggttcaagcgattctcttgcctcagcctcccgagtagctgggattaccggcgtgcgccatgaaacctggctaattctttttgtatttttagtagagacagggtttcaccatgttggccaggctggtcttgaacccctgaccttaagtgatctgcccatctcagcctcccaaaatgtaatcctaattagaggcctgagccaccactcctggccaaccttttatagttttgattttattaaataatttgattgaggtaatgaaatatagatgtgttccatttttagaaaactccagtctgataatttagaaagtatttgttgtatacttaaagttttccttattaggaacatctttattagactcaacactgacatatatatatatatattttttttttttgagactgagttttgctcttattgcccaggctggagtgcagtggagcgatctcggctcactgcaacctccgcctcctgggttcaagcgattcttctgcctcagcctcctgagtagctgggattacaggcatgcgccaccatgcccagctaattctgtatttttggtagagacgaggtttctccatgttggttaggctggtctcaaactcctgacctcaggtgatcccgctcacctcagcctcccaaagtgctgggattacaggcctgagccaccacacctggcctacactgacttacattaaagaaactcttcaaaaccttttttttttttttttaagagatagggtctcactttgttgcccaggctggagtgcagtggtgtgatcatagctcactgcagcctgaaacacttgggctcaagggatcctcttgcctcaccctcctgagtagctgggactgcaggtgcataccacactcgttttaatttaaaaaaaaaattgtttatgcagaaagggtctcataggccaggctggtctcgaactcctggcttcaaacaatcctcccaccttggcctcccaaagtgctggtgttacagatgtgagctaccacacccagccaaataattttttttttaataagagaatatgcattatttcctatgcttcatttgttttgcaatgaatgaatctattttctgccttccctcttccccctaaaaaaacaaaccagacttagcctagatctggcaatgtcatttagatattttatttcttttttttctttttcttcttcttattaattttttttttttttttttagctgagtctcgctctgttgctcaggctggactgcagtggtgtgatttcggctcactgcaacctttacctcctgtgttcaagcagttctcgtgcctcagcctcccaagtagctgggattacaggcgtgcaccaccatgcctggctaatttttgtaatttttagtagagatggggttttgccatgttggccaggctggtcttgaactcctggcctcaagtgatctgcccaccttggcctcccaaagtgctgggattacagatgtgagccagtgtgcccagcctattattattattttagagacagagtctcgctatgttgtccaggcttgtcttgaactcctgggctcaagtaatcctcccgcctcagcctcccaaagcactgcgattataggtctgaaccattgcacccagcctattttatgactctttaattggtaaaatatagttgaaaaaaaatttttttttttcctagatggagtcttgctctgttgcgcaggctgaagtgcagtggcgcgatcttggctcactgcaacctctgcctcccgggttcaagcagttctcctgccttagcctcccaagtagctgggattacaggtgcgtgccagcacgcccggttaatttttgtatttttagtggaaacggggtttcaccatgttgtccaggctggtctcaaactcctgacctcagatgatctacccgccttggcctcccaaagtgctgggattacaggcatgagccaccgcgcctggctgaaaaaatttttttaggaaaatgattgtttgcctttttgagacagggattcttttgagaaattgaagaattttctcagagaaaatgggtacacgtaaactaattttatgtatctttttcagagggtttactgccgatgagctaagaatcctcttgtaaggtatttggataggcaacttaaagacaattttaaacagctcctttaaaattataaaacgaatgctcttttattcccccatttctctcagttaactttgaaactacctcttagggcatttagctgtctctttctggaagatgaagttgtcttgagtactgggtgaactaaggtaacgttataaatggaaacacagttaaggtctaagggttttggaaactaaatgaagtttcactttttgttgtttctcagaacatttttcaaaccaaatatgatgccttagtttttcatagaatatgcttttatcctgtttagttgattacaagatgcatatttttctaccttttaacttctttttgattaagaaatttcttagatggccaggtgtggtggctcattcctgtaatcccaggactttgggaggccgaggcgggtggatcacctgatgtcaggagttcaagaccagcctggccaacatggtgaaacccggtctccactaaaaatacacaaattagctggtgtgggccgggcgcggtagctcatgcctgtaatcctagcactttgggaggccgaggcgggcggatcacgaggtcaggagatggagatcatcctggctaacgtggtgaaaccccatctctactaaaaaaatacaaaaaaattagccaggcatggtggtaggcacatgtagtcccagctacttgggaggctgaggcaggagaatggcgtgaacccgggaggcggagcttgcagtgaactgatatcgaggcactgctctctagcctgggcgagagagcgaggctctgtctcaaaaaaaaaaaaaaaattagcgggtgtgatggtccgcacctgcagtcccagctacttgggaggctgaggcaggagaattgcttgaacccaagaggtggaggctgcagtgagcctagatcatgccagtgtactccagcctgggcaacagagtgaagctctgtctcaaaaaaaaaaaaaaaaaaaattcttggaatccatgaagtcttgtaattgccatcagccaagtggtacttataacctagttgtgagagaccatttcattgaaatcttttggtaaatttttttttaaataccagtttcaatgtcatagatttgctaaaataaggattatttcttcctggattgaaggatttaggtcctaattaatactctgcgttgattctccttttttcaccttttgtgtcaggaaaaatttttattgaggactcattaaaggaaaagcaaattgtaggaaaagtcacttccttaaagatagtaagtgaaagtattaggacaatgataaccttagagcttttaagaatgatcggccaggcggtcgcctgtaatcccagcactttgggaggcaaacaacaaaaacaaaaagaatgatcttcataaaagcaaagctttttttttttttttttttgagacagagtctctgttacccaagctggagtgcagtggtacaatcttggctcactgcagcctccatctcctgggtccaagcaattctcctcctcagcttcccgagtagctggggctacaggcgtgtgccaccatgccagactaatttttgtatttttagtagagatggggtttcaccatgttggtcagggtggtctcaaactcctgacctcaggtaatccacccacctcggcctcccaaagtgctgggattacaggcatgagccaccacacctgtccaaaagcaaagcttttaaagctttaaggctagttagaccatttttcaacataatgataaaatgttctgttccatctttccaacttaatggtcagttggagacacgtgagagaaaggagaccatccagcaaattaggctacctctgataatctagttatggaaaaataacagtgaggaaaaggtataaattcagagtttaggactacagatttccatcttgcttaaagattatattgaaaaggtttaattcttttatgtttctgaacttcttttgaactgcttcacatacgactacagagatatctgagttggttggatgcagtggctcatgcctgctcacacctgtaatcccagcacttttgggaggcggaggtgggcagatcacttgaggtcaggagttcaagaccagcatagccaatatggtgaaaccccatctctactaaaaatacaaaaagtagccgggtgtggtggcatgcgcctgtagtcccagctacttgggaggctgaggcaggagaatcgcttgaacccaggaggtgcaggtttgcggtgagccaaaatcttgtgccactgcactccagcctgagcaacagaatgggactctgtctcaaaaaaaaaaaaaaaaatcctacagagattcctgagtaaaatttaacctctttgattgtgttaatatcaactttattcagcaagaaattgttattcagagattatgcttatgtacctcaaaattagttgactctgaagtgaatggaatgatagatactaagttgaagaggtaaatttagttcacatcaccaaggtttgatgttacttaaatgatcttccacatgataattggaaaattcaggtgttggaatatgtatttaagatgcaaagtggctaggagtggtggctcacgcctgtaaccccagcactttgggaggccgaggcaggcggatcacgaggccaggagattgagaccattctggctaacacggtcaaaccccgtctctactaaaactacaaaaaattagcagggcatggtggcacgtgcctgtagttccagctacccgggaggctgaggcaggagaatggcttgaatccagaggcggagaggttgcagtgagctgagatcacgccattgcactccagtctgggcaacagagtgagactctgtcccctgccgccccctccaaaaaaaaagaaaagtgaatagtccactttaaacacctttatttgatttagtaacaaatacatataaaaatgttttggttattgggtgggtgcagtggctcacgattataatttttacccagcactttgggaggcagaggtgggcagatcacctgagctcggaagttcgagaccagcctggacagcgtggtgaaaccccacatctactgaaaatccaaaaattagccaggcatgatgtcgtgaacctgtagtcccagctatccgagaggctgaagcaggagaatctcttgaacccaggccaatcgcttgaacccaggaagcggaggctgcagtgagccgagatcgcgccactgcgctccagcctgggcgacagtgagactctgcctcaaaaaaaaataaaaaggttttggttattgtcttattattattattattttttgacgctgttcgaataaaaaaaaattagtcaagcatggcagtttgtgtctttggtcccagctacttagaaggttgagttgaggtgggaggatcacttgagcctgggaggtcgaggcttcagtgagccatgagcatgccattgtactctagctgggtaacagagcaagactcagtctcaaaaataaataagttaaattaaaaataaataggctgggcaccgtggctcacgcctgtaatcccagcactttgggatgccaaagcgggcgaatcacttgagattaggagttcggcaccagcctggtcaacatggcgaaacgctgtctcaactaaaaatacaaaaattagcctggtgtggtggcgcacgcctgaaatcccagctacttgggaggctcaggcaggagaattgtttgaatgcgggaggtggaatttgcagtaagctgagattgcgccattgcactccagcctgggcaacaagagtgaaattccatctaaaaaaaaaaattaattaattaataaaattaaattaaaaattaaatcaggctcggcgtggtgacccatgcctgtaatcccagcactttgggaggctgaggtgggcagattacgtgagatcaggagttcaagaccagcctgaccaacatggtgaaaccccgtctctactaaaaatacaaaaattagctgggcatggtggcacatgcctgtaatctcagctactcaagaggctgaggcgggtgaattgcttgaacccgggaggcggaggttgcagtgagcccagattatgccactgcaatccagcctgggcgacatagcaagactccctctcaaaaaaaaaataaatacaaataaaataaattaataaaattaaaaattaaattaggctgggcacagaggctcactgtagtcccaggactttgggaggctgaggctggcggctcacctgaggtcaggagttcaagaccagcctgaccaacatggtgaaaccctatctctactgaaaatacaaaattagctggttgtggtagcacgcgcctataatcccagctactcgggaggctgaggcagaagaatcgcttgaacctgggaggtggaggttgcagtgagccgagatcccaccattgcacaccagcctgggcaatagagcaagactatttctcaaaaaaaaaaaaaaaattaaaatcaaacttatggagtgttttacaaggaactgttttaaaattttgatgacttcagtttttgtctcttaaaacttttttttttttttttgcagacagtctcactgtcgtccacgctggagtgcagtggagtgatcttggctcactgcaacctccgcctcctgggttcaatcagttctgctgccttagcctccaagtagctgggactacaggcatgtgccaccaccgggctaatttttgttatttatttatttatatttgagatcaagtctcgctctgttccccagcctggagtgcagtggtgcgagctcggctcactgcaatctccgcctccctggtttaagcaattctcctggctcagcctcccgagtagctgggattacaggcatgtgccaccatgcccagctaatttttgtagtttttttttttttgagatggagttttgctcttgttgccctggctagagtgcgatggcatgattttggctcactgcagcctctgcctcccgggttcaagtgattattctgtctcagcctcctgagtagctgggattataggcgcacgctgccatgcctggatacttttttgtattttcagtagagatggggtttcaccctgttggccagactcgtctcgaattcctgacctcaggtgatctgcctgcctcagcctcccaaagttctgggattacaagtgtgagccaccatgcccggcctgatttttgtatttttagtagagacagggtttcactgtgttggccaggctgggattgaatttacctcaagtgatctgcccaccttggcttcccacagtgctgggattatagttgtgagccaccgcgcctggccttttgtctgttgaatccacaggaaaaaaatggatctttaaaaaattctggactacttgaataagagaatgataaatcatatttcagaaaggctttttattagcaaattgatttctttaatagcaactttaacattaaggggagggtgggaatggtgccaatattgagaaaaatataagtctaagaatttggttttggagacattgggtactcagaaaggtggaagaatggaggcagcttaagtgatgagagattacctaatgggtacaatgtatactctttggatgatgggtacactgaatgcctagacttcacctctatgcaaaacatccatgtaacaaaactgcatgggtacccgcaaaatctgtttttataaaaagttgattttgggatgagaaatgatgatatagtacctctgaaagtgagagatgatagagaaagttaaatttctcaatacaatattggtttatgcttttaaaataataatgccttgatattttccaagtatatttaagcatcatagaggaaacctaagcttagggaaacattcttttcagtttcctcatttgagtctagtgagtgctattttttaacctctattacagcatctttagattagtgcaatcgttttttttttttttttttttttaaacagtttcgctctagttgcccagactggagtgcagtggcacaatctcggctcaccgcaacctccgcctcctgggttttcaagtgattctcctgcctcagcctcccgagtagcaaggactataggcatgtgccaccacgcccggctaattttgtacttttagtagagacagggtttctccacgttggtcaagctggtctcgaactcccgacctctggtgatccgccctcctcggcctcccaaagtgctaggattacaggcgtgagccaccgcgcccagcctaatcagtgcagtagttttaattggttaatttattctgcatttggatttccaagtttcataatttttttttttttttttgagacagagtcttgccctgtcacccatgctggagtgcagttgcgtgacctcagctcactgcaccttccacctcttggattcaaacaattctcatgcctcagcctcccgagtcgctgggactacaggcgcatgccaccatgcccagctaatttttgtattttggtagagacggggtttcaccatgttggccaggctggtctcgaactcctgacctcatgtgatctgcccgcctcggcctcccaaagtgctgggattacaggcatgagccactgcgcccggcctcataattctttagatatctgctttgctgattggacgcgttggctcatgcctgtaatcccagcactttgggaggtcgaggtgggcagatcacctgaggtcaggagttcgagaccagcctgaccaacatcgtgaaacccccgtctctactgaaaatacaaaaattagcctgtcgtggtgttgtgcgcctctcatcccagccacttgggaggctgaggcaggagaatctcttgaacccgggaggcagaggttgcagtgagccaagatcggccactgcaatccagcctgggggacacagcaagaatccctctcaaaggaaaaaaaaaaaaaagagatatctgctttgcttatttgttgcatgggcagctggtatttaatttgagggataagtcccataaaataattcatattggctcatttagtagcaaacatagtaatttgggttttaaacattgaataatttctaccttgttgaaataactgtggttccatttataagataatattaagaatgagtagagtaggctggtccgagtgcagtggtatttacaacctattgatcacaaccagttacagattgcttagtttcttcttcattccctctgtttcactgaactagcaaaaaaaaaaaaaaaaaaaaaaagaataggtaaagttataaaaacttggaaaatatgtagtagttcttcacagaaacagactggtggctgggtgttgtgcctcacacctgtaatcctagcactttgggaggttgaggctggtggatctcttgagcccaggagttcaagactggccgagcaacgtagtgagacccccatctctacaaagaaaaaagaaacagtggcttaaatcttaaaaaacagatttttaagtttacttgtaatcatacctgatatatgcaataaggcaaaacaaaagagttttgttattcaaaagaatattttccttcttatgacttaatactttttgtttgtttgtttgagacagagtcttgctctgcctcccaggctggagtgcagtggcgccatctcggctcactgcaacctccacctcccaagttcaagctgttctcttgcctcagcctctggagtagctgggattataggcatgcatcaccacacctggctaatttttgtatttttagtagagatggggtttcaccatgttggccaggcaggtctcgaactcttattttatttattttattttatttgtttgtttttgagacggagtctcactatgtcgcccaggctgaagtgcagaggcgcggtcttggctcactgcaagtttcgcttcccaggttcatgccattctcctgcctcagcctccctagtagttgggactataggtgcctgccaacacgcccggttaattttttgtatttttagtagagatggggtttttccatgttgatcaggctggtctcaaactcccgaactcaggtgatctgcctgcttcagcctcccaaagtgctgggattactggcgtgtgccaccgcgcccgacctgtgacccaggtattcttaagcttgattcattgaatcaacgatagcaatcactaataaattatttaggccgggtgcagtgcctcatgcctgtaatcccagcactttgggaggccgaggtgggcggatcacctgaggttgggagttcgagaccagcctgaccaatatggagaaaccccgtctctactaaaaatacaaaattaggcaggcgtggtggtgcgtgcctgtaatcccagctacttcagaggctgaggcaggagaatcgcttgaacccgggaagcagaggttgcagtgagctgagattgcgccattgcactccagcctgggcaacaagagcgaaaatctatctcaaaaaaaaaaagaaaagaaaagaaattatttaataccctttggttgaactttaatcaaattttttcggccgggcgctgtggctcatgcctgtaatcccagcactttggtaggctgaggtgggcggatcacaaggtcaggagatcgagaccatcctggctaacacggtgaaaccccgtctgtactaaaaatacaaaaaaattagctgcgcttcgcggccagcacctgtagttccagctacttgggaggctgaggcaggagaatgacgtcaacctgggaggcggaggttgcggtgagagccgagattgtgccactgcactccagcctgggcaacaagagtgagactccgtctaaaaaaaaaaaaaagaaagaaagaaagaaattatttaatactctttggttgaactttaattaaattttttcaaggttttttttaatgctctcagaatcaaaactttaattaaattctattatagttttaagtagtcaggtttatggaggtataatttatacattaaaattaatctttttagttacatagttctatgaattttgataaatgtatagtcacattcagttttttaaagaaaaagatgaccacagcagggcagtttttataccaaatttgtctatgtgagaagaaaatgaagttactcttttttcttaaaatatgaggaaaatggctctgaggactcagagttattatttgtgtggtacaatgagtcctcactaatttggattctactaatttgaaaattatgaggtttttcttttttgagaaaggattttgctgtattgcccaggctggagtgcagtggcacgatctcagctcagtgaaacctccgcctcctgggttcaagtgattctcctgcctcagcctcccgagtagctgggattacaaacacatgccaccgtgcctggctaatttttttttatttttagtacagacggggtttcaccgtgttagccaggatggtcttgatctcctgacctcgtgatccgcctgccttggcctcccaaagtgctggcattacaggcgtgagccaccgcgcccgactaatttttgtgtttttagcagagacgtggtttcaccatgttggccaggttggtcccctgacctcaggtgatccacctgcctcggcctcccaaagtgctgggattacagacatgaaccactgtgcccggctgatatggtcgtttcttgtaagagcttcagcattacttaacaataaaaaatgttctaagtaatggaagattatatgaaaagaaggatttaaactccatctgtcacttctcagttacattttacgacatagcattttattttgattgtggtgaatcatataattaccattttaaccatttttaagagtacagttcagtgacattaagtatattcactgtgaagtgtaaccagcatcatgacctattttctaaactttttcttcattccacactgaaactttgaagctgttaaatagtaactaatttttcccccttgccttcattctctggtaatctcaattctcctttctgtctttatgaatttgtttattctgggcaccttgtagaagtggagtcataaaatatttgtcctttagtgtctgttttatttcacttagtataattatctcaagattcatccatgttgtagcatgtctctgaatttcatcccttttaatggctgaataacattccgttgtttgtataattcatctgttgatggatgcttgggttgttcccacctttgggttattgtgaatcatgccgttctcttttggatgctgtaaatgtttggtagactctagagtcccacagtagttactttagacaattcctaccagctcagtggttgtttaggtgtagtgacggattcttggagcttctttttttttttctttttttttttttggagacagagtctcgctctgttgcccaggctggagtgtgatggctcagtctcggctcactgcaacctccgtctcccgggttcaagtgactctcctgcctcagcctcccaagtagctgtagagtagctggaattataggcacaaaccacctcacccagctgattttttgtatttttagtagagacgggtttcaccgtgttggtcaggctggtctcgcactcctgaccttaggtgatctgcccaccttggcctcccaaagtgttgggattacaggcgtgagccacacgcccagccttcctggagctccttagtccaccatcttccatgaccttgtcacgatattagctgttaaatagctactatttaattatatttataaaacctattcattatataaaaattagaaaatatagacctcgcacggtggctcacacctgtaatcccagcactttgggaggctgaagcaggtggatcacctgaggtcaggagttcgagaccagcctggccaacgtggagaaaccccatctctactaaaaatacaaaattagccggatgtggtgacacatgcctgtaatcccagctactcgggaggctgaggcaggagaatcccttgttcccgggaggtggaggttgcagtaagccgagatcgtgccgttgcactccagcctgggcaacaagaccgaaactctgtctcaggaaaaaaaaaaacaaaagaaaagaaaagaaaagaaaatattgataaacaaatagaaaaagagagaaattacccacaatcacatttcccagagtaatgagtatttcctttttgtccttccagatatgcatgttgggaacatattacataaactggtttgtaatatgttttgaaacttaatatgaatatgttttagctatcttttcatgagagaacatgcatgtctaagtgtaggttttttttttttttttttttgagacccaatctctttctgttgcctaggctggagtttaatggcatgatcttggctcactgcaacctctgtctccaggttcaagtgattctcttgtctcagcctcccgagtagttgggactacaggcacccaccaccatgcctgggtaatttttgtatttttagtagatacaaggtttcatcatattggtcaggctggtcttcagctggtgacctgaggtgatccacctgcctcagcctcccaaagtgctgagattataggcttgagccactgagcccggcctaagtgtagtttttaaatgccgtgtagtgtatatgctgtacttcatttctattgctggacacttaagttgtttcagccttttccttaatacaaaagatgtcgcaggaaactttatatgtccttacaatttttgtttgtttttgagacagagttggccaggcacagtggcttacacctgtaatctgagcactttgggaggctgaggtgtgtggatcacttgagcccacgagttcaagaccagcctgggtgacatagggagatcccgtttctacaaaaaaaaaaacaaaacagccaggcctggtggcacgcacctgtagtcccaactactcaggaggctgaggtgggaggatcatttgagcctgggaattcaaggttacagtgagctatgattgcactactgcactccagcctgggcaacggagtgagaccctttctctaaaaaaggcttgtagaagaaagtaaagatatgagttatttttgtacagctgtatagtgtgatttcgttttaagctaagaagctaagtgttgtttcaaaggtcaaaaagttaaaagtttgtatagtataagaattgtgggctgggcacagtggctcacgcctgttatcccagcactttcgggagggcgaggcagatggatcacctgaggtcaggagtttgagaccagcccggccagcatggtgaaaccctgtctctactaaaaatatagaaaaattagctgggcgtggtgggaggcgcctataatcccagctactcacctacaatattcagtatagtaacatgctgtacaggtttgaagcctaggagcaataggctataccatatagcctagatgtgtaggagcctataccatctaggtacaagtataccatttttgtgtaagcatgctgtatgatgttcacacaatgatgaaattgcctaatgatgcatttctcagaacatattcctgtcattaggcaacatatgactgtaattcagtggtttttagtcagaattgtgcaatcatcaccacagtcaattttagaatattttgctgggcttggtggctcatgcctatgatcccagtactttgggaggcagaggcacgcagatcatttgaggtcaggagtttgagagcatcctggccaacatggcaaagccccatctctactaaaaatacaaaaaattagccagacatggtggcacatgcctgtagtcccagctactcgggaggcagaggcaggagaatcacttcaacctgggaggcagaggatgcagtgagccaagatcatgccactgtactccagcctgggcaacagagcaagactcttatctcaaaaaaaaaaaatatatatatatatattcttgaggaagtgtgcctagcaggtaaattttttgaagctttattctaactttatacttgaaattacttggctgggtatagaattctagattggaaatcctgtagctttagaatttcgaggacattactgtattgggttcttagttccaaagatgatgtttgaaattcaagaatgttctaaatcctgtgcatggtatgtgaagagttttttcttctggaagtttgcaggactctgtgtgtccctgatttcttaaatttcacattgctgtaggtacttttaaactcatgtttttcagcattgggaaattttcttgaattatttcaagatattttctcctctatgtttttcctcatgttttttggggagcacccattatctggatatagaacagtctgaattaattcttctaattaacatatctttttctcttttttttcctttatttgtttttgagacagaatcttgctttgtggcttaggctggagtgcaggggtgcgatcaaggctcactgcagcctcagcctcctgggctcaagcgatattcttatctcagccccgaccatgcacagtgctgtgattacaggtatgagccactgtgcccagcctcttattttcagtttaggcagctgctgcttcttttttttttttttttttgagacagggtctgctcttgctctgctgcctaagctggagtgcagtggtgcgaacatagcttactgcaacctctgcctcctgggctcaagagattctcccacctcagcctcctaagtagctgagactgtaggcacctgctaccacacccagctaatttttatatttttagtagagatgggttttgctgtgttgcccaggctgttcttgaactcctgagctcaattgatctacctgccttagcctctcattgtgctaggattacagagccaccacacctggcctgttcttgttttttaatagagacagtgtctcaatatgttgcccaggctggtctcaaactctgggctcaagcattcctcctacagtgttaagattgcaggtgtgatccactgggcttagccaacattctgtttttgatgtcttggttttgatgtcttgatcatggttgtcgtttctcctattaactccctgaagacatcatgtatatacagatatataggtaaatatatatagcttatatagaagtatacatagttttatgtatgtgtaattatatgtctcatatataagccattatttacagttgtccttcagtatccatagggggagttccaaggacccccactgataccaaaatcttgaatggtcaagtcccttatataaaatgatatagtatttacatttaacctgtgcacattctcccatatgctttatttttttaatttatttttttgagatggagttttgctctgttgcccaggctggagtgcagtggcagtctagctgtattttttagtttgtattattttttattgctttttttactgttttttttttcttgtttttttttcgcttgaatatttttgatccactgttggtagaacccagggatatggagggcctactgtgtatacgtatataatgtttatatatatgtatgtacatatatatatacatttttaatacattttacttttcctgcatggactgttttcttcacgttgagttgtattttaagtgtttcatggtaaactttcctgagatgtttgctaatgttaatctgcttaatagtttttttttaaattgaggtgtatgtacatacaataaaatgtgtatatcttggctgggcatggtggctcacgcctgtgatcccagaacttcgggaggctgagacaggtggattatggattcttaatttactacagtttagtttatgttagttggttttattacttcccaggaaatgcaagaaccgtacatttagctctttacctccttcttgtcctttgccctattgatggtatattttcttataaacctctaaagcaacagtattattgttttacatagttgctgtggtctggccagtcgtggtggttcacgcctgtaatcccagcactttgggaggccgaggtgggtggatcacctgagatgaagagttcgagaccagctggccaacatggagaaacctggtctatactaaaaatacaaaaactagccgagcatggtggagcgcacctgtaatcccagctactcgggaggataaggcaggagaattgcttgaacctgggagatggaggttgcagtgagctgagatcgaggcactgtactccaacctaggcaacagagcgaggcactgtctcaaaaaaaaaaaaaaaaagttgctgtggtctgaatgtgtatccccaaaagacatatgttgaaacataatccccaatgtgatagtataaggaggtctggcttttgggaggtgattacgtcgtgagggctctggcttcatgaatgaaattagtgtttgtgtttttgtttttgttttgagacggagtttcactcttgttgcccagactggactgcaatggcagggtctctgctcactgcaccctctgcctcccaggttcgagcaattctcctgcctcagcctcccaggtagctgagataacaggctcctgccaccacacctggctaatttttgtatttttagtagagacggagtttcgccatgatggccaggctggtctcgaactcctgacctcaggtgatccacccgcctcagccttccaaagtgctgggagtacaggtgtgagccaccgtgctgggcctgagattagtgttcttatgacagaggccccagagagctagctagtccttttcactacttgagaatgcagcaagaaggcatcgtatatgaagaatgggcccttactagactccagatttgttggtgtcttggtcttcccagtctccagaactgtgagaaataaattactgttgtttaagctaggagtggtggctcatgcctataatcctagcactttgggaggctgaggtgggaagattgcttgagatcaggagtttaagaccagcctgggcaacatagcaagattctgtctctacaaaaaaatctaataagttagccaagtgtggtggtctacctgtaatcttagctacttgggaggctgaggttggaggattgcttgagcacagaagtttgaggctgcagtgagctatgattgtgccattgtactccaatctgggtgacagagtgagaccctgactcttaaaaaaaaaaaattctgttgtttataagccacccagtttatgacttttggtatagcagcttgaatgaactaagtaggtatgttttctaagttgcttttaatatttgtatgtaaaattagcagaaaacgtctctttcacaaacatacagatagtgctttttcccctttttctttttttaaaaaataaggcgaatatccatatccccagttcaagaaacagaacttttcagccatccaggagccatccatgtgttccatttcagttgtaactcacctcccaaaaaagaaaaataaccactacttcactctctctcagtcatttccttttcttttatagttttatcaccgtgtacattcttagacattatattttatttagtgttatgatgtcttttaaaccacagtttatgcctctatcccttttttttccttagtttttatgttgaagaacccagggagagttaaccaaagtttgaattttactgattgtacactcatgttgcatctttcttcattccttgtatattttgcaaattggttactgaactcagagacttggtcagactctggttcggtctctttagcaatactgtaggcagtgttgtgttctttcatggggaggcagaagtctggttttctcttttttttaaatcatgtccgcagttgttgggctcagtgcccagatccattaatttatcaatggtttaaaaatagtgacattctaattgtgtgggtttttttaaaattttttgttggaatacttttattaagagatgcttctgcttacctgctgttcagttatccagtggcacagttatataggaaaggtaggatatatacttgattctttgcctttatttattcttttttcaaaatagtgacttagttccctattattctctaagagaaccagctatttaatttaatttaattaattaatttttttgagatggagtttcactctttcacccaggctggagtgaagtggggccatcgcaactcactgcaacctctgccccccgggttcaagcaattctcctgcctcaacctctcgagtagctggaattataagcacctgccaccacgcctgatttttttttttttgagacgaagtcttgctttatcccccaggctggtgtgcagtggtgcgatctcggctcactgcaacctctgcctcccgggttcaagctattctgattcagcctcccgagtagctgggattacaggcgtgtgccaccatgcctggctaatttttggattattagtagagacggagtttcaccatgttggccaggctggtctcgaactcctgacctcaggtgttccacctgcctcggcctcccaaagtgctgggattacgggcgtgagccactgcgcccagccttatgtctttggccagttggagcttcttcaagttgactcctgaatgacttggtctacttcttgtagttttcgtagcatctttgctatctggtatgaccaggtgttgcaggcttatcttttacagtttctaccccagatttataacctattatttcttcaacaagccctggttttagtggcagaggtatttagggcgcctaatatggaccttagagattattgctgctgtgagttgtcattgtttctaggacagagttatgggtgatatatatgtatatgtgtatatctgtacacatgcttttttataaaacttaaccacttctgtattataatacatcggtgtatatttttccatgttaaaaattctggttctcaaggatagggaataatgaactagaatatcctcattattaattactcgcttgttttctcgtatattacacagtagtctcagaatagcaatactaataataccataaccaatgtgattgctgagaatagttgcataaattgtttcatgtatgctgtcctcatcaccccccgacatcatcatatctgtattatatctatcttgtcagattattcattacatgcaatattctctttcaaccttaatttgtttttattctgtaagtaattatatagttcagtggctggcattctttttctgtaaaaggccaggtagcagatgttttaatttttgcaggcccggaggcaaaattaaagatactatatttagggtgggcaaagtggctcatacttgtaatcccagcactttggaaggccgaggtcagaggatcacttgagcccaggaattctccaccagcctgagtgacatagtgagaccttgtttccacaaaaataaaaaaaaattagctgggcatggtggtgcacacctgtagtcccagatacgcggaaggctgaggtaggaggatcacctgagcctgggaggttgcggctgcagtgagccttatggcactgcactccagcctggggtgacagatttatattacaagagagaagataaatttccaccaatttgtattgacaaaattcaaataaaaataattgaaattttttttttggtaatgcaggtctcattaagaattgaattaattttggagggatggataattgcatcacttaataaggttattgttttcattaaaatggattgctcatgttgatctcgaatgagatttcctctttgaaaatgtcttcatacagattggtactgctaaatgcagatactagtacatgggcatatgattttcattgtgatatttattgcttgggagggagtatatagaattctgttagattcttctcttgatatttgctttttagcatgccattgtagtgtagattaatcacttccaattaaagagtacgtggaagcgctacaattgcacagttaactggattttgatgtatataaatttccttttgtacttggctgaaggtctgaaaaacactgctgaagctgcaatttgagctcaggaaatatattctagccacatgccatgacacatgcctgtagttccagctacttggaaggctgaggtgggaggatggcttgagcccaggctgtgatcgtgctactgcatggcagcctgagtgacagttgtgagaccgtgtttacaaaaaaaaaaaaacagaccactttttttttttttttttttttttaagacagagtcttgctctgtcgcccaggctggagtgcagtggcacgatcttggctcactgcaacctccacctcctgggggtgaagcgattcttctgcctcagcctcccaaatagctgggattacagacatgcgccatcccgcccagctaatttttgtatttttagtagagatggggtttcaccatgttggccaggctggtctcgaactcctaacctcaggtggtttgcccaccttgggcttgcaaagtgctgggattacaggtgtgagccaccatgcccaggcaagcagacctctttttaaaaaaaaaatcactcaacttacttcattagtagtaatgcagcaagtagaaaaaaaggaaaatacattcatagcaaatttgtctggaaatggaggttttacttcttgttttaacttttttgtttttttttttgagatggagtctggctatgtctcccaggctagagggaagtggcatgatctcagctcactgcaacctctgcctcctgggtttgagcgatcctcctgcctcagcccccctagtagctgggattataggctcgcgccaccacacctggctaattttagtatttttggtagagatggggtttcaccatgttgtccaggctgatcttgaactcctgacctcaaatgatctgccttggcctctcagagtgctgggattacaggcgtgagccactgcgcccagcctacttcttgttttaacttttgtttaagacaggaagtttatagagatgtttgacattacttataattcagacaacctttgttttcatccaaatattttgggttttaccactgcataagttttgtacataagtgctatttgtcatataattttagtttaaaaatctattaagaggtattatcaaccttgcagtaaaaaagctgatttccaaggccatttagtattctataatgatagttgaggttacttcttcagaaaaatttgtcttgatcccaagctcaaaaaattgcagttaaaacatcactgccatcagtacctgctgatgaataatacagtgagtaaccataagcttgaaacactttattacattttatattttcataagttttattaatttgtccaattaataagcctttttctgttccacacacacatatatataagtatttttgagagagtttcactcttgtcgcccaggctggagtgcagtggcgcgatctccgctgactgcaaccttcgcctcccgggttcaagcgattcttctgcctcagcctccccagtagctgggattacaggtgtgcgccaccatgcccagctgattttgtattttcagtagagacaggtcttcaccatgttggtcaggctggtctcgaactcctgacttcagatgatccgcccgactcagcctcccaaagtgctgggattacaggcgtgagccaccacgcctagctgtcccacatctattttttttttttttttttttttttaccatcagttgtaatgtttctttagcagattccatttaaggttgaactgaattagtgtttattcaagtttgaaaatattcttggtggtgttgttccaaacattcattagagaggctaattattcagtcacttcgaagtctgtattgactgctcaaataaacaactgagctgtatcagtaacatatgttgagtcctctagagccaaggaaaaccactcaaaatcatttgcctttttttttctttttctgagacagtcttgctctgtggcccaggctggagtgtagtggtgtgatcttggctcactgcaacttccacctcccgggttcaagcgattctcttgcctcaccctccggagtagctgggattacaggcgtgtgccaccacgcctggataatttttttgtattgttagtagagacggggtttcaccatgttggtcaggctggtcttgaactcctgacctcaaatgatccgcctgcctcgaccttccaaagtgctgagattataggtgtgagccaccaagccctgccttcattgccttggtttttaatcaactgttgatgttgcttacagtatcctcagcttgctgagcaactgttctcaccaaaaagctaataatcttatttcctctggacacattcctttttttcttttttgtttttgagacggagtttcactcttgttgcccaggctggagtgcagtggcacaatctttttttttttttttagacggagtcttgctctgtcacccaggctggagttcagtggcacgatcttggctcactgcaagctccgcctcccgggttcacgccattctcctgcctcagcctcccgagtagctgtgactacaggcgcccgccaccacacccggctcattttttctatttttttagtagagacggggtttcactgtgttagccagaatgatcttgatctcctgacctcgtgatctgcccacctcggcctcccaaagtgctgggattataggcgtgagccaccgcacccagcttggcctggatacatttctttgactggtataatcaaacatgatttaatgaactaatcattagtaagtggttcttgataggctaacaaatgagccatccacctaatttagttgctgttttattttcattattttatgaagaaattctactgtgataagatacttcatttagaattttctaggccgggtacagtagctcacgcctgtaatcccagcactttgggaggctgagtcgggcagatcatctgaggtcaggagttcgagaccagcctggccaacatggcgaaactctgtctctactaaaaatacaaaaattggctgggcgcggtggctcacgcctgtaattccagcactttgggaggccgaggtgggcggatcacgaggtcaggagatcaagaccatggtgaaaccccgtctctactgaaaatacaaaaaattaggcaaggtggcgggtacctgtagttccagctactcgggaggctgaggcaggaaaatggcgtgaactcgggaggtggagcttgcggtgagccaagatcacgccactgccctccagcctgggtgacagcaagactccgtctcaaaaaaaaaaaaaaatacaaaaattagccaggtgtggtggcacgagcctgtaatcccaacttcttgggaggctcaggcaggggaatcacttgaacccaggaagcagaggttgctctgagccaagattgcaccactgcactctagcctaggtaacagcgaaactccatctcaaaaataaaataaaatattctaattttttgctactattttcccgtgagttaggtactgttgtgtgatgagtgtaatttggtaatgtctatgaatagtgtattttttttaggatagttacattgtcattgcataataaagacaatgctttgtcatctaatttgacaaaacattccttgcgcctaaaagtatgacatttcaagtccacttttctctctctctctcttttttggttttaatatgatgggttaagcaatgacaataaaaaataaaatatcccagtacagcattatgtgtggctctcaaaacgttgtcaaatatagctactatatcactgtaattttgtagtatatcatgcagcagtgtgaagtgatgagaacaccacatatggtctcttgcaactgctaaactctgccattgtagcattaaagcagccacagataagttataaatgaatgagtatggttgttttccaataaaactttatttattgagttttatatagtttttatgtgtcacaaatattattcttttgattttaaccacatattttccttaacagtgtttctcatttcttcctgaagtggtacttttatctgagagattttccttcagcttagtgaacttttaataatttttatagtgcagatctgctgtcaacaacccgtctcagtttttatttgcctgaaaacatctttattttgctttttttttttttgaaggtttttttttttctggatataaaattataggctgggtttttttccccctttcagtactatgaagttttcattttattgttttctggctttatttatttatttgagacagagtatcactctgttgcccagtctgaagtgcagtggcatgatcttggctcactgcaacccctgccacccgaattcaggcgattttccttctctgcctcccgagtagctgggattacaggcatgcgccaccatgcccggctaatttttgtatttttagtggaggtggggtttcagcatgttggccaggctggtcttgaactctggcctcaagtgatctcctgcttcagcctcccaaagtgctgggattagaggcgtgtgccactgcgcccggccctggcttgcttaatttcttttagtaatgctattattgctgcatttaaagtaatgtcttttttcttttggctgcttttaatatttactctttgtgtttgttttcaacagttaaactttgatgtgcatgggtgtggttttctttcctgcctttggttcactgagcttctttatctttcattagttttagaaaattcatagccattatcttttcaaatattgctgcttcattctctctctcttcttcattaacctacgtatagtagaatttttgactatgttctgtgtgtctccaacactgtgttctgtcctttttgcccttgttttctgtgcttcagtttggatttgacctgaaattttttttttttttttttttttgagacggagttttgctcttgttgcccaggctggagtgcaatgacgtgatcttggctcactgcaactctgcctcctgtgtttaatccattctgctactgcagcctcccaagtagctgggattacaggcatgtgccaccacactcggctagttttttttgtatttttagtagagacagggtttcaccatgttggtcaggctgttctcaaactcctgacctcaggtgatccacccgcctctgactcccaaagtgctgggattacatgcaggagccactgcgcctggcctgttgacctgaatttaagttaactaattctgttttatactgtctatccaatgagttacagattctaggtactgtatttcaggtttaaatttttaaaatagtttccagtattctgttaaaattcattccaaaaagtcatttcataaattcattttgtgcaattttttcttctattttcttttaatatactaatcatagtcattttaaagtccacgtttgccagctccaatatctgaatcatctgtggatttgtttctgtacttttttctcctcttatcagtcattctccctctttccatacttcttaattttttaaattgtatacagactttgcatacaaaataatcctggagactaagatgatatctttctccctctttcctttgctaggtagataggatgtggggctgttcacctcaaatcagtcaaggattgatttaggttggggctgggttacagttttcaaaagacttagtatatcacctcagtttcaaaagactacagaagattgaattctgtcctctagctctgacaccatacagctataaaatcttttttttttttttaaatggagtcttgctgttgtagcctgggctggagtgcaatggcgtgatctcggctcgctgcaacctctgcctcccaggttctagcaattctcctgccttagcctcccgaatagctgaggttgttataggtgcctgccaccacgcctggcagatttttgtatttttagtagagacaggtttcaccaggttgaccaggctggtctcgagctcttgacctcaggtgatccaaccaccttggcctcccaaagtgctgggattacatgcatgagctaccacacccgccgagtctaatcttaaaatgagaaagttgtttaatttatcagagaactacaaagataataataactcctgtttaggccgggtgccgtggctcacgcctgtaatcccagtactttgggaggccaaggagggcggatcacctgaggttgggagttcgagaccagcctgaccaacatggagaaaccttgtttctaccaaaaatacaaaaattagccgggcgtggtggcacatgcctgtaatcccagctactcgggaggctgagacaggagaatctcttgaacctgggaggcggaggttgcggtgagccgagatctcgccattgcactccagcctgggcaacaagagcaaaacttcgtctcaaaaaaataaataaataaactcctgtttattgagtgattaatatgtgcactgctctgtgctgagtagggaaatatccttatctttttgtgtgtgtaggtgtgtatatacacaaacatatatatgtataccgaatatttaaagaaatatctgttatatataggtatatataaagagatatgtaagtaatatcaaacaaccattagttacttagctgtgtgaccctgtgtaagtttcttaaattctttgtattcattttccttatttgtaatacaggtttgttgataataactgcctcatagggttgttttaagaatcaagagtatggatggacgcctgtaatcccagcactttgggaggctgaggcaggcagggtgcttgagctcaggagttcaagaccagcctggacaacatggtgaaacctcatctctacttaaaaaaaaaaaaaaaaagtcaggcggtgtggtggcatgtgctgctagttccagctgcctaggaggctgacatgggagggtgacttgagcccaagaggtggaggttgcagtgagccaagccaagatcttactactgcgctccagcctgggcaacagaaccagaccccctctttgtatttcttacaccaacccaatgagacaagtaccactgacccaattctatatgtataggaaactaaggttcacagggagttgtccaaggtttcagtgattagtttacattcctggttctgcagcctatacaagtttgtctgcctatatctatattttttcctgcctccaaagcaggtgacacttggatatttacacagaaatttgtcaggcagttgtttggtaagaggaccagagaaacgcactgggctggagtctgtgacagagtacagccttgagagaagtacgtggggcatggcaagcagaaactaaatatgctatcagaacaagaattttggaattagagcacacagtggtattcagcttggcgtccagtaattagaccattaaggattggattgaggctgaggatctagagctctaaaaatcaagtcagaatttctcttaggagttagggatgcccagattctgtggatgtgtttaaagtggcagcaactgcaaagaggatcgctgcagagactgggcgtgaggctgccattagttgcttcatttctcagtcacctgtaaccattcttcattccatgatactagatctactattccctgataaatcagctgaacagacgagcctaccaaactcatggtttgatgccctctgcaataccaagtttcatctgtgtccttatggctgataactgacttgcatatctagcttcccgacttctggcttaatcttaacctcttaaatttgcctgcccctacaaatcctgccaatcgggattcctttttgccttcatattactgatttcaaacttgttttgttccttttttacatttaattgtttatttataaaaatagttcacatatatagttttaagagtaacatgtggtgtaagacttacaataaggaacaatcagttccctactcttccccattattcactagcaacccctttcagctcttataaaaatggagagaaagtgagtcttttgtttacttcctatggttacctccagcataaagccacacttcaggtgagccctgcccccagatgcagtcacttaggccaatatttacttaaaccaaattttttggttattgttctagagttcagttcataatcatacttctcattaatacttcttaaacattttggccttccaggccttttcttgcttgttggtatgcatatgtgtattaatttctttttacttccattcccacttctattcccctctgaatccttaggcaaacattgtagtatgtttgttcgtatcctttggtaggcactctttttaaaaacaattaaaataaaaatttttaaacaaccacaaacttacaaattcaaagaactattttcctgaaccatttgagggtgagttgccaacctctgatagtttcaccattcctctgaatattttaaagtgtatttcctacagacaagtgcattccacatcattataattattatcaacaattatgaagttaataattctcagcccccatttagttttgtcagttataataatgttcttcatagcagaaggatctggttcagagccaagtatttgcttttagttatcctgtttgtgtagtctctttcagcctgtaattgttccttagtcatgtcctagactttcatgacctttatagtttcggcagtacaggtcacttactttgtggaatctccttcaatttgggtaaattttccctatgttctttatattctttttaggtggtacatgattttgatttgtctcatttctggtgatgtccacttgggtcacttagaagatgtttgccaagcttctccactatcaagttactttttccttgtaattcatgagtattttgtgaggaggtgctttgaaactacataaacatcctattgctattgaacttctaatttattcatttatttatatctcaatggactcatctcctatttcattaaatgggtagtaatggtatacattcacataaagtgtgttttacatgcatgcatattacattggcataaatagtattattttaatatataactatataaaagtattaaaatattatctacatcgagaaagtcatatctagaagggtcaggataattatctgattggtagtaagactccaccgtaatgagataggtggggttcaacatatttaattaggccgggtgcagtggctcaggcctgtaatcccagcactttgggagggtgagggtgaggactgctgagaccaggagttcgacatcagcctaggcaacatagtgagaccctgtctctacaaaaaataaaaaacattaaccaggtggggtggcatgtgcctatagtcccagccacttgggaggttgaggcaggaggatcgcttgagtccgcgaggttgagggtgcagtgagctatgattgcaccactgcattccagcctgtgtgatagagcagaccccatctcagaaacaaaatttgatcacactagtgttatttctagctggcccggagttacaggaatccagctgcatgatccaaatctgacctggtcctagctgtggtttgctgccacctggtgacagttgtccacttgagtataaatataaatggggacaaatctggctaagacttccacacattggcagcaatttcaggtatggttagttgatgccaagttctttggcacaatcctgggagattgggcgaggagaatgctgtgaatgagaaagacccattctttgcttccttgctttctaagacaggtggcctattttcttcttctaggccttgctttgcctctgtgagggccatactgaatggtaggtaactgcgtttactgttctattgatgattttaattttatcttaagttttcttcatattaacaagtatggggccgggtgcagtggctcaggcactttgggaggccgaggcaggtggatcacttgaggtcaggagttcaagaccagtctggccaatatggtgtaaccctgtctctactaaaagtacaagaattagctgaatacagtggcgcacacctgtaatcccagctacttgggtgactgaggcatgagaattgcttgaacccaggaggcggaggttgcagtgagctgagattgcactgctgcactccagcctaggcaacagagcaagactctgtctcaaataaataaatgaaaattgtaattaatttttaacaaaggaaaaaaaagcagttaagatggaaggcccaactgttttagcagtaagagaaaccatgtggatgatttgtgtaggaactattttccagcacttcagaaatttgtttcaagtatttatttaaggcctactatctgtacttggttctgagtatgtaaaaatattctctctccctctgtctcaaaaaaaaaaaaaaagattctctcttctaaagcaagacttacctggctttaccttttctctctcttttttttttttttttttgagatggagttttgctcttgttgcctaggctggagtgcagtggtgcgaccttggctaactgcaacctctgcctcccgggttcaagcagttctgcctcagcctcctgaatagctgggattatggcatgcaccaccatgcccggctaattttgtagttttagtagagacggggtttctccttgttggtcaggctggtctcgaactcccagcctcaggtgatccgcccgccttggcctcccaaagtgctgagattacaggtgtgagccaccgtgcccagcctatcttttctattttaattctattacatattcttaccattttcaaatttctgctgatttatttatccatccacaaacatcttaattctttctagatgtcagacgcagatgattaatcacagtcctcagttttatggcccatgttgtcattggtctgtgcaagcaaccttatttttgttacttccttccaattttttttttttttttttttttgagacagggtctctctctgtcacccagctgggaatattggcacgtgccaccacacctagataattaaaaaaaaatattttgtggagtccagatcttgctgtgtttctcaggctggtctcaagctcttgggctcaagccatcctagcacctcggcctcccaaagtgctgggattacaggcatgagccactgcacccgtcccctaatggtgtaacttttttatgaattgttttaactgtgtcccacaaaatgtagtgttttgacaaagtttcttagtttcctttatttttctttttaacacgagtcacttagtatgttttagtttctaaatatattggttttttaacaaaactctacttttgatattaatatctaatttcattatatcatagttaatgtgatctctgtgatactggttatttggattttattgaggcttgctttatggctgtaaacgtgtacttgaaaagacttccttctttatctttgctgtgtacagagttctatatattgtctaattgttgagaatttttttttttttcgagacggcgtttcactcttgtcgtccaggctggagtgcaatggtacaatctcagctcactgcaacttccgcctcctggattcaagcgattctcctgcctcagcctcccaagtagctgtggttacaggtgcccgccaccatgcccggctagtttttgtattttttttgtagagacggggttttaccatgttggccagtttggtcttgaactcctgactttacgtgatccgcctgcttcggcctcccaaggtgctgggattacaggtgtgagccactgtgcccagcccagaattgttaattatattgtttagatcttcagtacttttatttttttctacatgattagtttctgagaagggagtattaaaatctgcaagtgcaatttttttttttttttttccaagacagggtctcactctgtcacccagactggagtgcagtggcatgatcacagcccactgcagctttgacctcccaggctcaggtgatcctcccgccttagcctcctgggtagctgggactacaggcaggcacccacctccacatttttttattttttgtagaagcagtttcactatgttgtccaggttggtcttgaactcctgggctcaagtgatccacccaccgtagcctcccaaagtgctaagattatcaccatcaatgatgggcatgatagttaattcatattaacattcctggccatgatagttaattcatatatttttctctgcattctctcatttgttacttgacatattttgttactgtaatttctaggtcacaaacatgcaggcttgtttgttatggttgtatcttcttgttttattattccttttagcagtacatactgcccctcatggcatttttttgtcttgaatttcattttatcagattgtttcttcagctttccttcagtttatttttttcctgtgatatttttctctcattttttgtgttttgtagataacattgttggattttggaacagatggaccaagaacttaaaataagcatgataatatgtttaagaaacttaggaattcagaatggtatattttatctggtttttgtccatctttgatacagttgtatgtactctttgagtgattaattattttggttcatgagtttgtttttcctggggttttcagctactctgtttggttatgtatattggggaaataatggaaatccaagttcgattcaagttcttgtctgcttctgagaggagggtgatccccaggcaacacaaaatcagcattgatcattcctgattgctgtcattttaccatgtaacaacactggacacagttgtactttgaaactcctagacagtagtggaaggagaccttcttttaaaattataatctaccagccaggaaacttgtaagaggaaaggctggaacagtggatgctgaggatggccagtcagcctgcatctgttttcattgaaaccttacagctaggcaaggtgcctcatgcctgtaatcccagcactttgggaggccaaggtgggcggatcacttgagcccaggagttcgaaatcagcctgggcaacatggcaaaacaaaaaatagctgggcatggtggcatgtgcctgcagccctagctgcttgggaggctgaggtgggaggattgcttgagcctgggaggttgaagctgctgtgagccgagattgtgccactgtactccagcctgggtgatagaacctgcctcaaaaaaccaaacaaaaccttatactagcagggctcttaccctgtcctggttttaccgtgtacacacttggcaagcaagggacagggaatgattttcccaaagcataaatgggtgagaaccaaggacaaaatgtaaatgctttttttcacccttccccacgtagccctcctactcccggtcagtcctcagcaaagcattattttctgaagttttttatttacttgtatcaatgtaatactgtatgtatatgtaattttaaaaattaaaaaactattaatactaggcttatgatgtgaaacagtagtttcttgctttacctattccctcccacatttcctctctctagtcttgtttgttttctggtacattacttaccactagatttctaaatagtgtgctcatattgctagttaatgatttttaaatttttagcattttctattgatttactattgtggaacatgagtttagctctttcataccactcagccttacctttaccaccattttcccttcctttatctttcccattatagtgatagcaatatcaagtgtttatgttattttaactatatataaatactatgttgactcttctcagttgtgtatgattacattacctttcttggaaaatcttttgtttttcctgaagttttctttttttttttctttccattttatgttgtttcctttgtcattctcatctgtaattccagattttctattagaactgtaaaacccctttacttctgtccttccgtccttccatccatccatccgtctgtccgtccttccatccatccatccgtctgtccgtccttccttccttcctttcacttttttttttttttttttttttttttgagacagagtctcattctgtcacccaggctggagtgcagtggctcaatctcggctcactgcaacctccacctcctgggttcaagtgattctcctgccttagcctcccgagtagctgggattacaggcgcgtgccaccaggccaggctaatttttgtattgttagtagagactggattttgctgtgttggcaggctggtctctaactcttgacctcaggtgatccgcccgtctgagcctcccaaagtgctgggattgcaggcatgagccaccctgcctggccccttatgagtttatatgcttttttttttattccccttactgtcactttagtagggtttcagaagacagtagagatgagtacttatgttcattctaatgttaaactgaaattagtgttgacttttatttatttatttattttgagatggagtctcactctgttgcccaggctggagtgcggtggcactatctcagctcactacaacctccacctcccaggttcaggctgttctcctgcctcaacttcccaagtagctggaattacaggtgtgcgccaccacacctggctagttttatatttttagttgatggggtttcaccatgttggccaggctggtctggaacttctgacctcaggtgatccacccaccttggccttccaaagtgctgggattacaggcgtgagccaccgtgaccaagtgttgacttttaaattttaaattagaaagtgttactatgataaactatacttgaaagtcatatttagttatctgtaggttaataacgttactgtagaataatgtagctgtgtgtgtgaaagagtggctgattagactggcatggttaacctttatgcttttaagtatatagaaattgacagattgttgaacggcatgtgaactgttttgcctatagttctttgagagtttattgttcatttgtccttttttccccctatttcttttttcagctaagcttcttaagatggaagttgttccttaataatggctaaagccctatgggaatatgttctttcatttattacaataagttagaaagtccttattactgtaaggccaagatgctaactttatgaggcaccagtttctcctaatggagagttttttcccccacctcacagaataatcgcatataataaaagctaatttacccactcctgaaggtaaaatacttactcactttcacatatctctatatagtacattactggatgatgtaaataacaattctcttttgttgtatcctgaagtaccctagaatcttctcaggaagagtaagttagattccgaaaggtagcttgccattatcaaaagatagtactccatactctactgtctcaggagagacaggagacaccttctgtcccgtctttacattctgatcagaaattaaagaaaataggaaggtagagaacaataagtgtattttgttaagcacttggttctttgaatatttgtaatctataatagagtatagatgttaattttttttttcctcagacggtgtctcactttgtcagccatgctggaatgcagtggcatgatcttggctagccacagctacgacctcccaggctcaagcagtcttcctgtctcaacccactaagtagctgggatgcaccaccacacctggctttttgtattttgctagagatagggttttgccatgttgcccaggctggtcttgaactcctgatagagctcaagcactccacccaccccagcctcccagggttctgggattacaggcatgagtcaccgttgccaggccaatattaaatattttaattagagtcagtgctaaatcattgcattctactctaggactatgccaggtaatagtgtattctctttacatttcagtttatggaggagtttgttttgttttgttttgttttgttttgtttgagatggagcctcactctgttgcccagggtggagtgcagtggcgcaatctcagctcactgcaacttctgctcccctgggttcaagcagttctcctgcctcagcctcccaagtagctgggattacaggtgcctgccaccacacccggctaatttttgtatttttagtagagacagggtttcaccatgttggccaggctggtcttgaactcctgacctcatgatccacccaccttggccacccaaagtgctgggattacagacatgagccaccatgtccggccggaagagttcattttaatattaaaaaatatatgctatgaattgtggtttctgagcagtaatgcatatactttgaaatcattaaacctttataaaatttttgttttcaaaatgtaattgttactatactctgtgtattttatctttgatagattaaaaatactctgatatctgctcaaagctgacatattcagaaatttatgaaaactaagctaagctgggaagcatagtttatattgaaatttgcttaggctcattgcccaagtttagtttggaatccctaacctgcctgatagttttagatccttgagaatatccctgttttaacatagtaggtcatattttcaaaatgcctacaagaatggtttatgtagagtattaaaatcttaagactgggatggactctgagatactatttttcattacatctttattttggaaaacttactagaactagtatttcccccctaaatagctgaaaatttttacagaagcattgttgtgacgttaggagccttgagactttaaatttctttgttttgtttttcagaataattttggattcaagaaaatatgatttggttatttaaatgtaggtttaatgtttaacatacagtccttgtggttatctaagccttttgtgtgtgtgtgtgtgtgtgtgtgtgtgtgtgtgtgtgtgagagagagagagagagagagagacaggatctctctctatgaccaggctggagtgcagtggcagtggtgcaatcagggctcactacagcttcaacctcctgggctcaagcaatctttctacctcaccttcccaagtagctgagaccacaggcatgaaccaccatgtccagctaatttttaaaatttttataaagacaaggtctccctgtgttgcccggattggtcttgaactcctggcctcaagcagttctcctgccttggcctcccaatgtgctgagattacaggtgtgagccaccttgcctgccctttttttttttttaaaaaaatagcattttaggagggcacgtttctcaagtaattatgtaaaaggaagttcttttgattgggaagaaaaccttcctgacaggcaaaatattgatacacaagcctcttttcctcctgacattttagccttttgtgtaagtttatgtttttattaccatcccctttcctctgattcctagttgctttcccctgacattttctgtcattaattaggttataagtggcagatacatttttggaagagactccagcatcctgtggtagtgacctgttactacgccctaccactctttggctgtgtaaaaacattgctgtcaataccttttcctttgttcattctttgaattcttgtgtgcttgaaatcagaattttcacagattcatggttgtatgacatcagattttcattttttgtttgactttatttgttttatttgtttgaattttcttctttctaggggtggtgtggtaaaatagaatatgagttaactcaaggcctggcatgttggttcacacctgtaatcccaccaattttgggaggctgaggcaggaagatcacttgagtataggagtttgaagccagcctgggcaacatagtgagatcccatctctacaaaaaaattaaataaatattgtgggtgtggtggcctgtagccctagctacttggaaggctgaggtgggatgatctcttgagcccaggagtttaaggctgcagtgaactatgatcatgccactgtactccagactaggtgacagactgagacaccccaccctccccaccccctccccacaatcgttaaccctgtgttaagtttttttttgtttgtttgtttgttttttgtttttttttttgagacggagtctcgctctgtcccccaggctggagtgcagtggcgcgatctcggctcactgcaagctccgcctcctgggttcacgccattctcctgcctcagcctccagagtacctgggactacaggcgcccgccaccacgcccggccaattttttctatttttttagtagatagggggtttcactgtgttagccaggatggtctcgatctcctgacctcatgatccgcccgcctcggcctcccaaagtgctgggattacaggcgtgagccactgcgcctggccaaccttgtgttaagttttaaaaagcaggccggggttggtggctcatgcctctaatcacagcactttgggaggccgaggcgggcagattgcccgaggtcaggagtttgagactagcctggccgacatctctacaaaccccatctctacaaaaaatagaaaatacaaaaatacaaaagttagccacgcatagcctataatcccagctacttatgaggctgaggcacacgaatctcttgaacctgggaggtggaggttgcagtaggtggaggttgcagtgagctgagatcatgccactgcactctagcctaggcgacagagtgagaccctgtctcaaaaaaaaaagtttgaacaagctagtcttcattaattagataatgggaaacaacagtatctgacagtcttctgcaattttaattttaaagggtttattttgtgtactttttcaaaagcagtaacatatttaaggtaaacttgaatgttttttgatggagtaaaatatggattgatgaaagtgttttaaatcttttcagtctgttgtttcttttccaaatgactgtccccagagataccatttgttgatccactttcttttttttttttttttttttttttaagacggagtctcacactgtcgcccgggctggagtgcagtggcacgatcttggctcagtgcaacctctgccttccaggttcaagtgattctcctgcctcagcctcccatgtagctgggattataggcgcctgccaccatgcctgactagttttttttatttttagtagagacagggtttcactatgttggccaggctgatctcgaacgcctgacctcatgattcacctgcctcggcctcccaaagtgctggaattacaggcatgagccaccgtgcccggcctgttgatccactttcatagttggtaataaaactttattgcttatcatttggtatgataaacaaccaaaagttagtgatttcgatgtcttccttattctcttttgcctttgccatcattataacctagacttttgctccttcatatctggtagtttaaccccattcggttgtcatacacacctcatatccagaacttctttcgttatgttagccgcctgcccaagaatttgggagtgtcttttcctgctggctaaattagacagaactgccaaagatagtatataggcaaactgctcatttcttttcttgtcaataagcttgatgtttgacatatatttctctctttggctgaattacatgccgtgtgctctcattttttcccactagtatgcacaaaaaaatgctatcctatattttttaaaagttgctgacacactttgcttataggagtggttttctagctaagcttctcagaatcctcaaaaaatctatgaatagtctggtaagtagtagagtatgtttcttctttttggcttgtgtcctttgcctgttttactgtagaagggtttgtctttatgtcttgatttagaaacactcatataacgctttgaaaaaaattttaaacatttcccccattttgtggttttgcctttaacatataaacagtatgttttgttatatagaattgtttaacttttattttataaaattcatctattactttctttaaggtttttaatctttggtgtcatgcctaaagaaagtataccagcatggtggctcacatctgctttgggaggcctaggtgggcagatcatgaggtcaggagattgagaccatcctggctaacatggtgaaaccacatctctactaaaaatacaaaaaattagccaggcatggtggcacgcacctgtaatcccagctactcaggaggctgaggcaggagaatcccttgaacccgggaggcagaggttgcagtgagccaaaatcgtgccactgcactcctgcagcctgtgcaacagagcgagactccctcaaaaaaaaaaaaaaaagaagaagaaaagaaagaaagtacatgggtacatggtaagccgggcgtggtggctcacacctgtaatcccagcacttttggagcccagggcagattcatcacctgaggtcccagcctggtcaacatggtgaaaccccatctctactaaaaatacaaaaataagcagggcgtggtggtgcgtgcctgtaatcccagctatttgggaggctcaggcaggagaatcgcctgaacccgggaggcagaggttgcagtgagccgagatcaagattgcgttgccagtgtacttcagcctgggggacagagagaaactccatctccaaaaaacaaaaaaaaaaaaagtgcatggtagatttagtgtttttcgtgaaaaatttagaaagaatataattgatgtttattttgtatgttttggaattattatcattttaaacttatattaaggacattctaatatggggcaaaactgatggctaattttattgggttttgtttgttttttgagatagaatctcgttgtgtcattcactctgctggagtgcagtggcatgatctcggttcactgcatcctccgcctctcggattcaatggattctcctgcctcagcctcctgagtagctggaactactggcatgtaccaccacgcctggccaatttttgtatttttagtagagatgggatttcatcatggctcactgcaacctctgcctcctaggttcaagctattctcatgcctcagcctgctgagtagctgggattacgggcatgtaccaccatggccccgtttaatttttgtgtttttagtaaagatggggtttcaccatgttggccaggctggctttgaactcctggtctcaagcaagcagtccttttgcctcagcctcctaaagtgctgggattacaggtaggagccaccatgtctggcctgattactaattttatctgctgatgttcatatatgtaagtatatgaggtgttaaagatacttcatcaataagggcagaaaaaaacggaaaggaaaaacttcttagcactagaatgtctttccttgtggtggaaagcagacaggccatgtagctttgagctcctgtgttcagaagatcagttacccaggatgtcttatcctggctgtcaaggatcccatttcttagattagccataacaaaccattcatgagttatatatatgtaacacatggtaataataatagaaactctgagagcccaaaatgctaaataattctattgttattaacaattgaatcaactatttaaaaagttgttatgaaagtaataacatactttgaaccttttcaactcttctggaattactcccacatttctaaatattcttaatttactttttaagagatggtgtcttgctttgtcgcccagggtggagtgtggtgttgcagtcatagtccactgctgccacgaattcctgggctcaaactattctcccgctgaagcctcctgagtagctgggactgcaggcctgccaccaatctcagctaacttttaattttttttttttttttttttgagacagagtttcactcttgttgcccaggctggagtacaatggcgtgatcttggctcactgcaacctccgcctcctgggttcaagcaattctcccgcctcagcctcccaagtaactgggattacaggcgtgtgccaccacacccgactaatttttgtatttttagtagagatagggtttcgctgtgttggctggctggtcttgaactcctgacctcaggtgatctgcccaccttggcctcccaaagtgctgggattacaggcgtgagccaccacgcccagccaacttttaaaatgtttttgtagagatggggtcttgacatgttgcccaggctggtcttgaactcctgggttcaagtgatcctcccaccttgacctcccaaagtgctgggattgcagtgtgagccactgtgcccaacttacttcctttctgtctgtctctctgtctctctctctatctatctatctatctatttttttaagacagagtcttgctctgttgcccaggctggagtgcagtggtgcgatctcggctcactcaccgcaacctccacctcctgggttcagcgattctcctgcctcagcctcccgagtagctgggagtgcaccaccatgcccggctaatttttgtattttttagtagagacggggtttcaccatattggccaggcttgtcttgatctcctgacctcgtgatctgcctgccttggcctcccaaagtgctgggattacaggcgtgagccaccacgcctggccttctaaatattttaaatgccgtttttcatttttaaaatttctagtttgttgttaactatcatacttctactgtggaagatgaggatttctctcattactgtaacaccccatcccataaacgtattcattagctctccatatttccagtagttatagttttaatttagactaattttcagtgtttacattaatataactatgtaaataatagttccggttgaaccatgtcatacaccattattaccttttctttcacatgtagtgtagtgttttgttttttgtttttgctggaattcctcttcatccctccacatttagtttttttgtgtgtttttttttgtttttttttttttgagatggagtctcactcttgttgcccaggctagagtgcagtggagtgatgtcggctcactgtaacttccacgtcccaggttctagtgattgtcctgcctcagcctcctgagtagctaggattacgggtgcccaccaccacactcggctaatttttgaatttttagtacagatggggcttcaccatgttggccaggctagtctcgaactcctgacctcaggtgatccacccacctcagcctcccaaagtgctgagattacaggcgtgagtcactggtgcccggctcacatttagttttctaatgtgcttatcagtaattcatccctgaactctgacagagtataaaatctctttaaatacacatggttatcatacttaactgaaatgtaattaacttttttttttttttgagacagagtcttgctccctcacccaggctggagtgcagtggcatgatctcagctcactgcaacctccacctcccaggttcaagcagttctcctgtctcagcctcccgagtagctgggactacaggtgcctgccaccacgcctggctaatttttgtatttttagtagagacggagtttcaccttgttggtcaggctgatctcgaactcctgacttcaggcgatccacccgcctaggcttcccaaagtactgggattacaggcgtgagtcaccgcacccagccaacatttttaatttgatcaaaacatgtgaaggtagaaagttgtatgtgtcataaatatagcagttggtggattttcacacactggggcatctgtatatctagtcttcagatcatgaaaaaagaaaattgccagtactacaagaagccctttcttgtgttctcttacagaaccatcttcccatctcccaggataatccctatcctaatttctaacagtatgaattaattttgcttattcttgaatttcataatagagtcatactctttattcataggagttctttatatactgtgcatattaaatcatttgttggattgtgtatgtgaatccacatacatgtattgtgaataacttcttccactctgtggcttgcttgttccctgttttaatgattttttcgatgaaacagaagttcttggttttaataaaatcagaattatcaatgttttcttttatggatattactttttgtgtcctattttaaaacttttgtcccctccaatgtcctaaatattcctggtttttttggtggtaaagtatatataacataaaattcaccatttcagtctcaatctgctgaccttgtgatctgcccgcctcggcctccaaaagtgctgggattacaagcgtgaaccaccgtgcccggccataattttttttattttttgaatctcttttgtgtcaggcttctttgtcatatatgttgatgtgatttacccacattatgtgtagttgtagatcatttgttctcatgctaggtagtaatctataaatgactcttccacttcatccattctcctattgagggtcatttgggtagtttcagattttgtctgtatgtatattcctatttatgaacatttcagtttttgtattttggtgaaaatatttattaaggagtggactttttgaaccttaggctacatatatgtacaggtgtagtaagattgccagttttctaagctggttgtacctgttctgcattcctataagcgctatatgagagttatggtagttttgcatctttgctagtctttttcattttaggtattttgcttttaatttgcatttccttgatgactaatgatgttgaacaccatattaactgaatttatttactggcatttagatatcctcttttgtgaaatgcctgttcaagtcttttgctcactgcaagctctgcttcctgggtacacgccattctccttcctcagcctcctgaatccaaaattagctgggcatggtggtatgcgcctgtactcccagctacttgggaggctgaggcaggagaattgcttgaacctgggaggtagaggctacagtgagctgagatcgtgccacgatactccagcctgggtaacagagcaagacagggcctgccaagtgccagccacctcagtggagggtcagtcaggatggtggcccctgtcctctcagcaccctgttcttgttcggtgtccaggaagaatcagctcacacgaactgtttgaaaggtgatgaatgcagaagactttattgagcagtgggtggctctcagcggaaagggaggctggaaaggggatgggaaggtgatctttccctgaagctgggctgtctctggcaggcccctctccgaagccgcactgtctgaagatagccgaatttttcctatgctcagctgcttgtatccttgacactcagccgcttgtgttgctctgccagctgaagtctttttatgggcacaggataggggcggggcaggccaaaaaggcaacatttgggctgaaaaatagggtcagctgttttcacttaggacaaacttaagggtggggcttagccaggatcccagcctttctgtcagtttgaccttaaaacctgcagcacattatatagccttactaggggggatgtgtgtgtgtacacacacttttttttcccacatactattattgaacattttaaagatttgtagttggcagacttttgacactttgagcaagttaataagaaagcatgttttaaccacccttttcttggggttgcgctgctgtccaaggattgcataacaagggcagcactgctaatgcctacacaacactcccgcctcagctagagctttgctttaccttggtgcaatttttggaaaaatgaaaacctgctctaccctccccccaaaaaatatgtcttgattgcttttgctgatgttatgttggaaacatatcctatggcagatgtgatctgatgacgtagcagaaaaactcagcagtgggaatatcctcatttcacactaaatccaggcacaaatccaaatacaacagtaaccactacatttgccatcagctgagctattaccaagtacaattgtatttaggactaggaaactttttcacctacttaatagtatgttaataaataggtagcaggaataattgggatatatttcattattcatatgtaattgttttttggccaggcatggtggctcacgcctataatctcagcactttgggagactggggtgggtggattgcttgagcttgggagctcaagaccagcctgggcaatatggcagaatcctgtctctactaaaaatgaaaaaaactagttgggtgtggtggtgcaggcctctagtcctagctgcttgggaggctgaggtaggaggattgcttgagcccgggaggtcgaggctgcagtgagcccagattgtgccactgtactcccgccagggcaagagaccctgtctcaaaacaaacaaaaacatgtaattttttttgtcattgctgaaattccatctgaaaataattagtaggataacaaaacttatttaatactgcacattgggggttacctaaattttgctccaagtcagtttatacttggttttacatagttacatatacaatgttttatttatttatttatttatttatttatttatttattttgagacagagtttcgctcttgttgcccaggctggagtgtaatggtgcagtctcagctcactgcaatctctgaggcctcccgggttcaagtgattctcctgtttcagcctccctagtagctggaattacaggtgcccaccaccacacccggctaattttgtatatttagtagagacggggttttcaccatgttggccaggctcgtctggaactcctgacctcaggtgatctgcccacctcagcctcccaaagtgctgggattacaggtgtgagccaccgtgcctggccgggacataatgttttttaatgactttttgcttatgcattttagggtacatctttgcctagatattttttatttttaaattattttttgttttgtttttgtttttttatttttttgagatggagtttcgctcttgttgcccaggctggagtgcaatggcgcgatctcggctcaccgaaacatccgcctcctgggttcaagcgattctcctgcctcagtctcctgagtagctgggattacaggaatgtgctaccacacccagctaatttttgtatttttagtagagactaggtttcactatattggtcagtctggtcttgaagtcctgacctcgtgatccacccgccttggccttccaaagtgctgagattacaggcatgagccactgtgcccagccttatttttatttttttgagatcgaatctcgctttgtcacctaggctggagtgcagtggcacactctcggctcattgccacctctgcctcctgggttcaagcgattctcctgcctcagactcctcagtagctggaattacaggctcatgccaccattcccagctaatttttgtatttttagtagagatggggtttcaccaagttggccaggctggtctcgaactcctgacctcaggtgatctgcccacctcggcctcccaaaatggtgagattacaggcgtgagttaccatgcccggcttttatttttataatgtactatgtttggggagaataggaaaccaaggaaagttatgatgagggtacattaaattaaaaagaggatcttgggaggagccaagaagtatgagaacgagtgagtagaaaagttagagcattaggagacagtgaaattggagaaccccaggaaataaagtggttcaagaagacaaaatgataaatgggaaaatgctttttggtagtcatagatgactggaaaattatctactcctcaataaataggtcatatgcatttatgtctatattttcttaactgttaatttcacaactgagtgaagtgatacagttagctcaatggctgacatatagtaagcacttaatgagtattatttatcactacttggatctgtcattgttcacttatttcctcaatatagaaaactgagagttgtccttgaatttttctttctcctcaatcccaatattaaatcaattacagagtctcattgactatacttcctgtgtgtctcaaaaatacgttttgtgtttattccaactgcctctgtctttgctcacatgtgtaagcctttctgcattatttttccctttgcctgtaaggtccctttcaccttggcctcaatacttggctcaagtagtacccctttgtaaattttacctgaatgtctcagccagaattaggcatttatttcactgtgctctttaagcaactagtagagatttcatttgaggcacttaatttgtaatcatttatttgcatgcctgtcttttaattaaaacatagccattcaggcatagtgttctaaatatgtttatttcctacctcccatattggtacatggtaacatgtttggttttcagttaacaatatgttgagaaattgaataagtgaaaatatttacataaatagtgtttgtataactaaaaataggtgtctgatgagttcggtgatttcattgagggtacacttagtccattgtcagggtgagttgaaactttaaaaattaatttaaataggatatgcttgtgagtggttcaggcattttagggagaacatatgtggtaatggtacagaaatgtattttggaggtacttgttctttttatttatttatttttaattctatttgcgatggactagaggaagtacttgttcttatgagtttgcgtattagtcaaaaaagatgtaaggagttgcccgaaaaagagcctctcaagattgtaattaacttctgtaacaattgcttctattgagtgacgtctcagattcatttccgtatttattttttttgagacggagtctcgctctgtcgcccaggctggagtacagtggcgtgatcttggctcaccgcaacctccacctcctgggttcgagcaattctccagcctcagcctcctgagtagctgggactacaggtgtgtgccaccatgcatggctaattttttgtatttttttagtagagacgtgttttcaccatgttagccaggatggtctccatttcctgacctcgtgatccgcctgcctcagcctcccaaagtgctggcattacaggtgtgagccactgcacccggcctatttcctgtatttcttgagacagctgatatataggtcaaatttaaaactttacctcatgaataatttttttttaattaaagactatttttttagctgggcatggtggctcaagctgggattacaagcatgaggcaccatgggagactgaggcagggggatctcttgagtccaggagttcgagaccagcctggggaacatggggaactatctctaccaaaaaaaaaaaaaagttatccaggcgtggtggtgtatacctgtagttccagctatttgggaggctgaggcaggagattcacttgagcccagaagattgaggctgcagtgagctgtgatcatgccatggcactggtcttggtgacagagtgagaccttgtttcaaaagaagaaaaagaccctctttcagagcagtttttaggttaacagcaaaattgagaggaagttacagatgataatttttttaaatggtaaacttcaatatttaaaaatcgaggcaccaggcatggtggctcacgcctgtaatcccggcactttgggaggccaaggcgggcaaatcacctgaggtcagaaggtcaagaccaacctgaccaacatggagaaaccccgtctctactaaaaatacaagattagcagggcatggtggcacatgcctgtaattccagatactcaggaggctgaggcaggagaatcgcttgaacctgggaggtggaggttgcagtgagccaagaccgcaccactgcactccagcctgggcaacaagagcgaaactccatttcaaaaaaaaaaaaaaagatttggtgtgtgtatgaatttggttagcagataacgctttagtacacttgcttaacggtttcagaaataaatggttaagatttcatatcaggccgggctctgtggctctcacctgtaatcccagcactttaggaggctgaggcagatggatcacttggggtcaggagtttgagagcagcctggccaacatggtgaaacctcatctctactaaaaatacaaaaattagctggatgtggtggcaggcacctgtaatcccagctacttgggtgggtgagacaggagaattgcttgagcctgggaggtggaggttgcagtcagcagagatcacgccactgcactgctgcctgagcgacagagcaagactccgtcttaaaaaaaaaaaaaaaaaaaaaaagatctaatatcatagatactactttaacttaattaaatggacctgtaggtaaatgaaagtcatttttctctttaattttgtgctgctgtttttttcccccaccccttagcacagcaatggtaaaatgtctcctaggtcatttagggctggacagccaactgtgacttctagatataatgaactattactaagttattatttttacagtttaacagatagcatgattaagcaaaagtttattgataacttgaataaaaggttactgcagaaagaaccagtgcttatgtatatgcactgtataactgcaaagtaaagatgataattccatatgtgacctaaacataagactccctaaggctatcaaacttcttaaggaagttcagttataactcatagatttcatatgtacacaatttcgaatgaaaaatatcctgtaatttatattaaaacttttttggggaggggccaggtctcgctctgtcacacaggctggaatgcagtggtaccatcatggctcactgcatacttgacctcccaggctcaagcggatactgccacctgagcatcctgagtggtcataggctcaagccatcatgcctggctaagttaaaaaaattacggtgtgtgtggagacggggtttcaccatgttgtccaggctgaacttgaacttctgggctcaagcgatccgcctgccttggcctcccaaagtgctagggtttcaggcatgaaccagccactgtgcctggcctaaattttttttttttttttggatggaatttcgttctgtcacccaggctggagtgcagtggcacgatctccgctcactgtaacctctgcttcccgagttcaagcaattctcctgtctcagccgcccaagtagctgggattacaggtgcccgctgccatgcccggctaatttttgtatttttagtagagatggggtttcaccatgttggccaggctggtgttgaactcctgacttcaagtgatctgcctgcctcgggctcccaaagtgctgggattacaggcatgaaccaccgtgcccagccttaacttagtttttatattttcaaacttaattgagtgtatcattccagatgtcaattttcagtgcaaagtaggcatagaccattgtatagaagattcacaagtgaaaaatcttcttttttcagtttataaaaataataacatgtttattatatcagtcataaagaagttacaaagttctttaaatgccccattcttcctccgttgccctctgttcctgagctgatcattgttaatggttaggaatgtgtcttttcagtctttttaaatatatacataatgcatatgaagaaatatatatgcacacattgtttttatatatgtatatatattattattatttatcctacccgccccctcctccattttattttgtaattaatttctacttttcatttcatttgtgaaaatttcagaatagttttttgtttgtttgtttgttttgagacagggtctcgacttgtctcccatactggggtgcaatgtcaggatcatagctcactgcagcctgggttcaagcaatcttcccacctcagcctcttgagtagccaggactacaagtgcacaccaccatggctagctaattttaaataatttttttgtagagttgggggtctcgctatgttgctgaggctagttttgaactcctgggctcaagttgatcctcccgcctcagcctcgcaaggtgctgggattataggcatgagccactgtacccggcctcaaaatgtatttttaaaatatgttttgttttacctttttttttttttaattggccaggctggtctcgaactcctgaccttgtgatccacctgcctcgacctcccaaagtgctgggattacaggcgtgagccactgctcctggccaagttttgttttactttttaaaaaactttaaatgaaaattactacagcaccaactaaataacatgtatttttgagacctaactgtaatactattatcacaactataaaagctcataattccttaatatccagtcaatgtttacatttcccttgttctcataaatttagtttgttcaaatcataccctgaaattactaagatctataatgggtaagagcaaattttctaatatattgaactttattttcccttttacttcttgtggaaaatactttaatatttattaatgctcctcaatacaatgataatgatttaacctttgatttgatgatttaagattatcttggagccagtcgtggtgccacacccctgtagtcccagctactcagtaggctgaggtgggaaaatcacttgaggtcttgagtttgggcaacatagtgagaccctgtctctaaaaattaaaaaataattgtgtcttgggatccatttttgaagtttctcttaaaatttgtatatgatcctcatgataactccctagggtcagtgttttttgccattttacataaaaaggaacttgaaatccagagatttaaatgagttgacctaaggtcagaggcctagcaaagacaatgcttagaattgtgcctgacaaataaaagatagaaaaatgtaaattaaatagtcaagaatcatgccagggctacaacacagggctactgattctagtaccttcccttcttcttttaaaatcattatattgttctgtgaatataactgaaatggtatgagatcttatattcatatgttaatagcaagttatatcttatttcataaaatttcaaaaagggaagaaatttcagtgacaagttggctgaagtaggagtattaaatatgtgtatgaggtaatacataggtaactataggtcaccatatacatgtgaaatagtatgtttaaatttttaataagggctgggcatggtgactcacacctgtaatcccagcactttgggaggccaaggcaggtggatcacctgaggtcaggagttcgagaccagcctgaccaacatggtgaaaccctgtctctactaaaaatacaaaaattagccaggtgtggtggcatgcgcctgtagctactcgagagactgaaacaggagaattgcttgaacccgggaggcggaggttgcagtgagccaagattgcgccaatgcactctagcctgggcgacagagcaagactccatctcaaaaataaataagtaaataaacagttaataaggttctgaaaaataagtaaagtaatagagatagagataaaattgtataattgctcagggaagcattacagcaggatattccccctgaatgttaacttcagctgaatagttgaggattgtaaactccgctgaaggagttcttagtacaatttaaatagccttaccagaagcacaccaaccaatgttacctcttctagtggtaatgtaagcatactttaggcatgatgctttaaaaaaatcaatcataaggccgggggcggtggctcacgcctgtaatcccagcactttgagaggccgaggtgggcggatcacgaggtcaggagatcgagaccatcctggctaacatggtgaaaccccgtctctactaaaaatacaaaaaatgtagccgggcatggtggagggcgcctctagtcccagctactcaggaggctgaggcaggagaatggcatgaactcgggaggcggagcttgcagtgagccgagatcgtgccactgcactccagcctgggcaatagcgagactccatctaaaaaacaaataaaataaataagagttcgagaccagcctgaccaacatggtgaaaccccaagtgtactaaaaataacaaaaattagccaggcatgttggcacatgcctgtaatcccagctactccagaggctgaggcaagagaacagcttgaatttgggaagtggaggttgcagtgagctggacaacagagcgaaactccatcttaaaaaaaaaaactacttctagaataaagtcaaaagggtcacattaaaactacttatgattgaatttttttttttttttttttgagacggagtctcactctgttgcccaggctagagtgcagtggcgcgatctcggctcactgcaagctccgcctcccaggttcatgccattctcctgcctcagcctcccgagtagctgggactactggtgcccggcacccatgcccggctaattttttctgtttttagtagagatggggttactccttgttagccaggatggtctcaatctcctgacctcgtgatccgcccgcctcagcctcccaaagtgctgggattacaagcgtgatgaaggtagtatttttaaaagattatatagtagataatggtcaaaaagctgaaagttcaagaataattcaaaatattagatgcttagagaaaatacagaaaccccattaatactactaaccaatatttattaagatttaagtggaatataattaggtttggtaaggctctaagaaaactaattccataatcatcaaggtcttaaggttggtattaatctttccagttgtcttatctaaagctggtagtattataatctaagggcaagtaggtaaaagaggtaaaacagtgaaaattagcaatatataaaacagccttcatgatttttgcccctctctgtctgtctgtctgtctgtctgtctctctctctctctctctctctctcccactctccctccgtctttcctcagcctcctgaatagctggcattacaggcaactgccatcacgcccagctaatttttgtatttttagtaagtgatggggtttcaccatgttggccaggctggtcttgaactcatgacctcaggtgatccgcccacctcagcctcccaaagtgctaagattacaggcgtgagccactgcacccatccacctatttatatttttatatcttttatttgtcaggcacagttctaaacattgttcaagcattacctcatttaatcctcatacaaacgcattaaataagtactattatcccctttttactggtgaggaaactgagatataaattaagtaattgagcaatacgcagcggctcacatctgtaatctgtccaggagaacgatggctgtttggaccagtggcccaggtccaaacttactgagtaaagtaatttactgaggcagttgtaagtaaaggaaggcaggccaggtgcagtggctcacgcctgtaatcccagcatttagagaggctgaggcaggaggatcattgagcccaggagttcgagaccagtcttggaaacatggtgaaaccctgtccctacaaaaattaaatgaaaaattagccaggcctggtggtgcacgtctgtagtcccagttactctggagactgagatgggaggatcgcttgaatctcggagatggaggttgctatgagccaagattgcaccactgcactccagcctggttgacagagtgagaccccgtctcaaatttacaaaaaaaaggcagatttattagagaacataggaaaatacattgcgagggatgccagcagcctgccagagagaagccaactgcagagaaacaaaggcttggtagagattttataggatagtgtttatgctgtatgctgaagagggctttgtggagtactgaaaatgccaaggttgcagtgagctaacttgcaggtgtgtggtgatagttgggcacaggaagattgtgagttatttacacaggaggacttatgtgtcctggacgatgaagaaaggctgacttgtggcttatctgctttcttttattgcttttccctcggtcccactagcctgactcctttcccctaattaggactacacagagtacccagcattttaggaggccaaagcgggaggattgcttgagcccagaagtttgagaccagcctgggcaaagtggtgaaatctttacaaaaaatcaaaaatttagctgggcatggtgtcatggcctgtggtctcagctgctcaggaggctggggcaggatcgcttgagcctgcgaggtcaaggctggcagtgatccatatttgtgccactgtactctagcctgggtgacagcataaccctgtcttaatcagtcaatcaatcagtcgatcaatataaattaagtaagggtcgcttaagataacagctgagttgtagagtcaggattcaaacccagatagtcctggcttcttgagtcagtgttctttactgctatctgtgctaccttttattatattggtgcatatcatctattctacataaattttcatgcagcactgcaaagatttctcttagtaccctaagtaatcttaacaagacttttttctgagacagggtcttgctctgtcacccaggctggagtgcagtggcgtgatcacagcttactgcagactcgacctcctgggctcaggtgattttcccacctcagcctcctgagtagctgggattacaggcacgtccaccatgcttggcgaatttttgtattttttgtagagatggggtttcaccatttgcccagactagtcttgaactcaagcaacctgcccacctaggcctcccaaagtgctggaattacaggcacaagccacggcgcctggtcacaagactttttttttttttttttttttttgagacgatgttttgtttaattgatttctgcttttatgtcagttctctttcttctgcttgcttctagtttaatttcatagtctgtcctttcctctttattttgtttgtttgtttggttttgtttttttgagacaaggtctcactctgtcacccaggctggagtgcagtggcaaggttatgattcactgcagcctcaacctcccaaacttaagtagtgatccttctacctcagcctcccaagtagctgggacctcaggggtgcaccatcatggctggcaactttttgtattttttgtaaagatgaggtcttaccatgttgctcaggctgccctccaactcctgcgctcaaggaatccacccgcctcggcctccctaagtgctggaattataggtgtgagccactgcacttggcctaattttgtatttttctcatttcttaagtagaagcttatattattgaaatgagacctacattttttccagtgtaggcaattctaaaaatttctatttgagtattgctttaggtgtatgttacagattttcattgtcatttttttcatgttcaattaaacaattttctaagtaactttgtggcttcctctttatactgtgatttgtacagttacgtaatttccaaatgtttggggatttactaaatatctttgaatttagaaaatcagaatttctagcttaattcattgtggccaaagaatatgctatgtattatgtcatttctttaaactttgtagatagatgttgtacgttccagaatatggtatgtcttggtgcgtgttctatgtgtccacaaaaataatttgtatgctgctgttgttcagtggcatattgtcttctatatccttactgagtttttgtctccttgtactttaaaccaggggtgcctacccgatactgatctggtacaactctgtggcctgttaggaagtaggccgcacagcaggaggtgagctcagcctccagtcagatcagctcaggcattagattctcaaggagtgcgaaccctgttgtgaactgggcatgtgagggatctaggttgagtgttccttatgagaatctgactaatgcctgatgacttgaggtggaacagtttcatcccgaaacacccacctcactacccttcccactcctccgccctcttgtccatggaaaaattgtcttcaatgaaatcagtccctggtgccaaaagggttggggactgctgctttagactgttgagagagaagtgatgatatcttcaactgtaattatgcatttttctatttttccatttggtggcaaaagtttttagttacatcattttgtgttctaaagctctgttgttaccagtgcacacacagttaatattatgtcttctttgtgaattgatccccttatgaaattaccctctttatctgtgataatattttttgttctaaagtatactttctctgttattcagatagccactccagctttattaactaatctccagttagtttagtttagatttcaccagtttctgcactaatgtattaattaaggtataatgcatataccataaaattcacccttttaaagtatatagttcagtggtttttagtatattcagatggttgtacagccatcaccaccatctaactccagaatatttcatcatctcaaaaagaatccccatactcattagcagtcactctgtattctcctgtgcctccatatcatcatcttatttcagagtccagttcaggatatcacactgtatttagttgtcccgtctttttagtctcctccagtctttgatgatttctccgtctttcctcattttttgtgaccttgacaatttttgaagaggatgggtcaggtttggtagaatattcctccatttgggttatctgatgtttttctcatgactagaatggggttatagattttgggggaagaataccacaaagatgaagtgccttacttactacatcatatcagggaggtcatgataccaatatgatttactgctagtgatgttaaccttgatcacttggttaacatgtctgccagatttctctacggtagagctactatttctttccatactttattgttagaaagtgagtcattaaatccagcccacactctaggaaaggggaattcaacttcaccacctgaatgtggattatgattatttgtagtactactgtaaggaagatttgacccttctccaccagtatttttccattcagtaatacttatcagtatgtactcatttatatttatttcatattttgggtaacagtattacattatgtattttgtagcttcgattattctagttttggccattaggagctcttgcagtttggctcctatgctgttttgaaatactccaatttgttttctttagcacttactttttggcattataagatgctctaggcttgtcttttatttttcctgccacagatctagaatcaggtgtttcaccaaagggccctggttccttttattgaataatgatattttatattattttatttatcttttgagatggagtctcattctgtcgcccaggctggagtgcagtggtgcgatctcggctcactgcaacctctcctgcccgggttcaagcaattctcctgcctcagcctcccgagtagctgggattacaggcacctgccactgcacctggctaatttttagttttactagagatggggtttcaccatcttggccaggctggtcttgaactcctgacctcgtgatccacccgcctagggctccaaaagtgctgagattacaggcgtgagccaccataccggccaaataatgatattttagaaatcaagatctttgagggacctgggtgtttgggctccagccttttttccccctaatcagctttattgtgattttaatgcatatgtcatacagttcacccattcattaaagtatatagtttagtggtttctagcatattcacaaagttgtgtaaccatcaccaaaatcaattttagaatacattttgtcatctgaaaaagaaaccttgtgccgaggatagtggctgatacctgtaatcctagcactttgggagtctgaggtggacggatcacctgaggtcaagcgtttgagaccatcctggccaacatggcaaaaccccatctctactaaaaatacaaaaattagccaggagtggtggcacatgcctgtgatcccagctactcgagaggctgaggcaggagaatcgcttgaacccaggaagtggaagttgcagtgagctgagatcatgccactgcacttcagcctgggcaacagagcaaggctccacctcaaaaaaataataataataattttaattgtgtcccatttctttttacttttgttccttgtgtttttggtgtcacgtgtacaaaacttagtgaatgcaaggttatgaagatttacacctatgttttcttttaagaattttatagtttctctcttatcttagtcctccaattcaattcattgttgacactgtctacctggagataacatcagattctataggttaaggactcagtcccacaagaaagactgcctccattttggatgcctatggcagacctatactcctgatgaatcagctataaattgggatttccactactcccccttaaaagaataagatcaataaggccgagtgcggtggctcatgtctgtaatcccagcactttgggaggccgaggcaggcagatcacgaggtcaagagatcaacgccatcctggccaacatggtgaaaccccatctctactaaaaaatacaaaaatttagctgggtgtggtggcatgcccctgtagtcccagctactcaggaggctgaggcaggaggatcacttgagcctggaggtggaggttgcagtgagccgagattgcaccactgccctccagcctggtgacagagcaagactctgtctcaaaaaaaaaaaaaaaaaagaaataaaaaagaataaggtcaataaattgacctatcttcaaattcactattttttctacctgctcaaatctgttgctcagcacttaatttttttttttaatttcagtttttgtacttcttaaatttagtcatcaaaaggaatgaacaggccagctgtggtggctcacatctgtaaatcccagcactttgggaggccgaggcgtggggattgcttgagcccaggagttcgagacccagcctgggcaatatgatgaaacctccagccccacaaaaaaattagctgggcttggagatgcatgcttgtagtcccatctactcaggtggctgaggtgggtgaattacttgagcccagaatgtcagggttgcagtgagctgtaacccagtgtactctgtctagcctgggtgactgacagagcaagaccctgtctcaaagaatcaacagtttttgtacttaacaacttaagaatctctctctctctctctctctctctctctctctctcttccccctctcttccccctcctacccccaacccctttattttttctttttctttctttttttttttttgagacaggctcttcctctgctgcccagccctgagtgcagtggtatgatcatagcccactgcagccccacctcctgggctcaagtgatcctcccacctcagcctcctatgtagctgggaccacagacaccaccatacccgactgatttttaaattttttgtagagtagggtctcgctaccttgcctaggcttgtctgaaattctgggctcaagggatccacctgcctgagccttccaaagtgttgggattacaggcatgagccaccactttttgtggatttttaaaaataatttatctcattattgatattcagtatttatgggtgaaacaccattctcatgctttcctttaagttctttagccatgattttctttagtcctttgaaatgtttaaaggtttaaagataagctgatttagtctttgcctagtaacttgaatacttaggtttccagtttctattgattcttttttttttctcctgttgtatggaccatactttgttcatagcttgtaatattttgctgaaaactagaaatttaaataatatacagtggcacctgcaggaatccaattctcctcttccccagggtttttgttgttgccattgctgctgctgttgtaattactgttgacttcttttacctaattatataatgtcgatattattgttatgtgtggccagtgaattctccactcagcttagtggtcaggtaatgattgaacagagatttccttggttttctagaaccagttagttagctggaatttgtagagaggctctgcgtatgtgtcattgcatgtcttcaacttaattcagacaggcatttgcaaactctttactttcttgttgtatacattctcaagttaagccagaggtataaagttagggccttcttagggctttcctgagcatgcacatagtgctgggcatgtgcatagctctacacattgtcatggtattatagactcacaataatttgtcagagcttttcagaaccataatggacaactcttagcccagcccagcttttccttaacgtttttggttagtctgttttgtattttccactgcctcaggtacctttaagattaaatagttgcctgccattgttttcaacaaagctgccagggaaaatgttttcatattggccaagctccaaatccaatcatatgtagacagccttgcaagtggagttttctagggaaccattagaaaagtaaacttaatgacaattctctgggagtaaggctttggcgaaatgccagcccattctatcctctccagggcctgtcagcttccttggtttttactttgaatgtgttttaaggctgctgcacagctagagtataggagattggattagggtaagttaaaatcacgtagcttgatgttcttactgaatgtcagccattttctttaaatatctactccttgaattgttgcaagcctctggttattttctggaattctgaaaatgatgcttataatttttggcaattttcccattgcttttgtggaagagagaacttttcaggttttctggatttcttcatatataaaatacggggatactgcaaaggacgttcactgcagcaggatttgtaacagcaaaggtgtgagaaacaacccaaatgcccaaaataaggaaatagttttataaaatggttcatgtaggtatacatttgatggagtataatgcagatactgtcagtcatccatgtaaagagaatattttatggtgtaaaaaaaatgtttacaatgtgatacaggtgaaaaaagcagaatacaaaatacagtatgttgaagtttttaaaaatacgttttgtaagggaaatcagcaatgtcagcatttattatttctgggtgatagaatgacagttaaattatgtgagtaaaaagaaaaataccgttgttccatattgtgtactctaaaattagattattttgttataaaaataaaatgtacagagtactgtttttcacttgtgaggcaagttaaaattatatttatgtatgtttgtgtatgtgagtgagtgtgagttttggtgacttaaaatagccttttataggggcagggcacggtggctcacgcctgtaatcccagcactttgggaggccgaggcaggtggatcacaaggtcaagagattgagaccatcctggccaacatggtgaaaccccgtctctactaaaaatacaaaaattagccggacgtggtggcgtgcacctgtagtcccagctactcgggaggctgaggcaggagaatcgcttggacctgggaggtggaggttgcagtgagctgaggtcacgtcactgcactccagcctgctgacagagtgagactccgtcttaaaaaaaaaaaaaaaaaaaaggcttttataaatatttgaaggggtgctgtaagaacttactaatgaccctggcactggggataacaaagtatgtctgagctactttaatctcaagagtttactctatgaaaggagctttgtttctgtggcgtgtagtagggtgaattattaggcagatgaataagttatagtctcatttattagcatttcattttttttcttttcaggcgcatattaaatttcctattgactacccctattcaccacctaccttcagattcttgaccaaaatgtggcaccccaacatttatgaggtaaggagacatccatcataaatttctctgaagatttttttttttaaatcagtactttaaaatagcctatctcagcacactttgatacttaggcttttgtagccatagagaaatattaatgattttgcacttcagttaacagtttctggattaattatttaacattagtgtagttttataatatcctgtgtatattctacaggataaaggataaagtaaaggatttgggctttagacttttgctgttcattgctagggttataatacacatgtctttaacatgtgcatttaaaaatttagtagataatgtaatataaatttatttgtgtgcctatcctctaacttcacagcaagggtcacctgttcctatgggtgagagattcagcttttggtagggggagcgggatttatcccattacatttggactggcctccttttaggaattgctgctgaacatttgggaggctcttttggaataaattcaaggtgaggttcttgtactagacaagtgcacatgcctgggggaagcatttctagctttgttgatgaaacgtacttagctttgggctaatccataaggatactagaataatgcattctgtttctcaggttgatatatgagggcccgctagtttttttcctttgaggctactcttcactattctataagtgtgcttttttgtttgtttgtttgtttgtttgtttgtttgtttgtttgtttttgagacagtctcgctctgtagcccaggctggagtgcagtggcgcaatctcgctcactgctacctctgctttccggctcccagttcaagcagttctcctgcttcagccttccgagtagctgggattacaggcatgcgccaccatgcccagctaatttttgtatttttagtagagatggggtttcaccatgttggccaggctgttcttgaattcctgacctcgtgatccacccacctcggcctcccaaagtgccgggattacaggcgtgagccaccgcgcctggcctactattctaaaagtgtgtttttaaatctccaaatgttttggggattttgcaggtatctttctgttaggaacttccagttaaattccgttgtgatctgaaagcagacattgtatgatttctatttttaaaaatttgtcagtatgtgccttatggcccagaatgtggtatatcttcatgaaagttccatgtgaactcaagaacaatgtgtaatctgcagttacgagtgtagtagtctataatgctcattatatacacttgaagaatggtgttgctgagtccagctatgtctttacttattttctgcctgccagctctgtccatttcaaaaaacaaaaaaacaaacaaaaaaaaattctgtaatcttttatttgcaatatggttttgcagtggtctcattttttcgtagcagcatcccaagcattgaaattgctttagagtcttgccatcttagtcatgcatcagttcttttttttggccctgtggatgttggaagtacctttgctccagaaactgagctaacatcacctttaaattacttttattttatttatttatttgttatttgagatggaatctctgtcacccaggctggagtgcagtggtgcgatttcagctaactgaacctccacctcctgggttcaagcgattctcctgtctcagcttcttgggtagctgggactacaggtgtgcacgaccacacctggctaatttttgtatttttagcagagacagtgtttcaccatgtcggccagagtggcctcgaacttctgaccccaagtaatccacctgccttggcctcccaaagtgctgggattacagggtaagccaccatgcccggccacctttaaattgcttttaggcaagaaatggagaactcgctctagggtcttgaatttggagttcattctgtataaatgagcacattggggcagctgtgtcattttccacagtctgtttcttatgtaagatatcttaatttttctttttcagacagaacagactggtactgaaatgatatatagttttctttttagaaataagctttctaaatattgtttaatatttgacataatataaataaacaatagtgactacactgttctgtgtaacaacattatcttccttttgtaggaaagagtctgtagaaataattcattgtttcctaagttcaaactgagttcagtacgcacagcagtattttggtgtctgtcttagtacatttgcttagactggataatatattaacaacagaaatttattgctcacaattctggaggctgggaattccaagaccaagccaccagcacatttggtctgttgagggcttgtttttcaagcctgttttgttgcatctttatgggagaagaggcaaggcagttctctcttgcctctttctttttttttatttttagtagagacagggtttcaccgtgttagccaggatggtctcgattgcctggcctcatgatctgcccaccttggcctcccaaggtgctgggattacaggcgtgagccaccgcacccggccctctcttgcctctttcataagggtgctaatcccattcatgggtgacaccaaaattcagaccataacaatgtccctgtctaataattaaaggtttttgcctttacagttacgtggtgtatatatagattttagatagcaagagagaagtgagaaggagcaaacttttgtcttgcaattgagagctaattacttttgtgtttttgagatggagtctcgttctgtcacccaggctggagtgtggtggcatgatttcagctcactgcaacttctgcctcccttcaaggattcttttgccccagcctcctgagtagctgggactacaggtgtgcaccaccacacccagctaagttttgtatttttagtagagacagtgtttcaccatattggtcaggctggtctctaactcctgattgtgatcctcccacctcggcctcccaaagtgctggggttacaggcgtgagccaccgcacccagcagagagttaattgctcttaaagccatatacatactatttccatctcagttatctaattcccaaacacctctcaaaaaagaaacagaaaaataggataaaggagtcaaagctctacaggaaagaagtgtaggtaggtaattacactcccctttccacttttttttcagtacataggctatttagttctttcaagagataccattagatcatgatataaaattttttccatattcataatgaatttttctacaataaaatgcatgcatatcccataaatgtgtagatatttttcacacacaaatgttttgtttttaaagaagtgataggccgggcgcagtggctcaccctataatcccagcactttggaaggctgagttgaggagttcaagaccagcctggtcaacatggtgaaaccccgtctttactaaaaatacaaacatcagctgggtgtggtggcacgcgcctgtaatcccagctactcagcaggataaggcaggagaatcggcttgaacccgggaggcagaggttgcagtgagctgagatcgagctaaggccgggctcggtggctcacgcctgtagtcccagcactttgggaggccaaggcaggcagaacatgaggtcaggagtttgagaccagcctggccaacatggtggaactccgtctccactaaaaatacaaaaattagccaggcgcagtggcaggtgcctgtaatcccagctactcaggaggctgaggcaagagaattgcttgaacccaggaggcagaggttgcagtgagctgagatcatgccactgtactccagcctgggcgacagagcaagactctgtcttgcagggacggggtggttgggggaagaagtgacaaatcatatttaggaattaaatttgatgttgtcaaaggaatcataagaaactcttctcacgtgactattaaccttcatagcagtatggaaatagtatcagaattgaaatttttgaggaccagtgttggtatttgtggtaatagagatctagagaccccatctggccaaaaatagtttcttatgtcatgttttttgttgttgttgtgtttttttgttttttttttttgagatggagtcttgctctgtcacccaggctagagtgcaatggtgcaatcttggctcactgcaacctccgcctcccgggttcaagctattctcctgcctcagccttctgagtagctgggattacaggtgcctgcccggctaatttttgtatttttagtagagacgccgttttacatcttggccaggctggtctcgaacttctgacttcgtgatccacctgcctcggcctcccaaagtgctgggattacaggagtgagccaccacacccagctcttatgtttttaaaaagacaggtgtggtcaggtgtggtggcttacgcctgtaatcctaacactttgggaggccgaggtaggcggaccacttgaggccaggagttcaggactagcctggccaactcagtgaaatcccacctctactaaaaatagaaaaaattagctgggcatggtggcacacacctgtaatcccagttgcttgggaggctgaggcatgagaatcgcttgaacccaggaggcagaggttgcagtgagccaagattgcaccactgcactccagcctgggcaacagagtgagactcctgtctcaaaaaataaataaataaataaatcaaaagacaagcgctttggtcacagtttattaaataaatgtatagatatattactgcagcccccaaaagttgtaaataactgttgtgttacatgagtggatttattttaaaattgtcttctccttgagttaaagctgcaaaactttctgttgttgttggctgggcacagtggcttatgcctataatcccagcactttgggaggctgaggcaagttcaccaggcgtagtggcacatgcctgtagtcccagctacttggaaggctgaggtgggagggtcacttgagcctagaaggtcgaggctgcagtgaactgtgtatatgtatgtgtgtgtgcatatatatatttatattttcatcattaccatatttgtgaaattcattagtatcaatggagaactaggaaaactaaggaaatttgataggaatttgtcatcagtgattgtgctgcacaatctatttcctttctgctttgcgaatttgtcatcagtgatggtactgcacaatctatttcctttctgttttgcactgtgtttagtgagccttaatatatatgttactggttacattctggtcatattgttaaaaagtagacaactaatgagcaccatatttttcacaaactgtattacaatgagagttcatataacactttctttactacagacttcacagataaggcaacacatagaatttcactgttcattagtacctaaacattttttataatagacattaatttttagagcagttttgggttcattacaaaattgaggggaaagttcagagaaaaaaattgctgattattttattaatagtgtgttgtagaacacagtatggagctttttataagttcctctatggggttatacatttataggtttatctatatggtacattaggcatcatttagaatatattagtatttaggccactaaatttgtacttttcagagctgagctctggtttgtaaataacttgtcacaagcaggattttatgcatatttatgtaattcttggatttacagatcttatccattttctcttaacattttaagatatagggaaaaggtttcctaagtattgacatgcccaaatttggccatatatcagaatcatgtggagaagttattaaaaagaatcctggaaatttttatttaattggatttggatggggtgtaggctagataattcttcattttatcttttagaatccccattctagagtccaataacttccttattaaaaaaaaaagaatttattgagatgaaattcacatacataaaattaaccatttaaagtaaacaatttgcagggagatcccttgagcccaagagttcgaagtttcagtgagctataatcatgctactgcaccagcctgggtgacagagcaagactgtatccttcattcataaataaataagtaaataaataatcaattcaataacatttagtatgttcataatgttgtacaactattaatacctctatgtagtggtaaagcgtttccatcactccaacttaaaatacactacatatgaagtaatttctctccgttcccatgttccctcaatctctggcaaccactcatctgctgtctctatagatttacatattgcagatatttagtataaatagcgtcatatagtatgtgacattttgtgtctggcttgtttcactcagcacaatattttggagattcatccaccttgtagtatgtatcagtacttcattcctcttcatggctgaagaatattgcattatatagatataccacaatttgtttctacatttatcttttgatggacacatttggattgtttctcccttttgtatatgtgaatagtgctgctctgaacatgcatgtgcatgtagtttttgagtacctgttttcagttctttgggttacatacctaggagtggaattgtggggttaaatgggaattctatgtttaactttttatttatttatttatttattttttgagacagagtctcactctgttgcccaggctgggatgcagtcaggatttcagttcactgcaacctctgctcctggccccaagctattctcgtgcctcaaccacccaagtagctgggattacaggtgtgcaccaccacgcccagctattttttgtatttttagtagagacgggattttgccatgttggccaggctgatctagaactcctggcatcaagtgattcacctgccttggcctcccaaatgctgggattacaggtgtgagccactgtgcccagctgactttttcttccttcttttttctttttttttaaacccattttcctgttagtgctgggattacaggcatgtgagccactgtgcccagccatcttttaaatggactgccaaattttttctcatagcagctgaactgtttacattcccaccagcagtgtgtgtgtgttccagtttctttacatccttaccaacacttgttattttccttttctttaaaaaaggctaggtgcagtggctcacatctgtaatttcagcacttttaaaggccaaggcaggaggattgcttgaggctaggagtttgagaccagcctgggcaacatagcaagatccccatctctatatttaaaaaaaaaggacaaaatatagctatcctaagtgggtgtaaagtggtagctcattgtggttttgctttgcattacccacatggcttatgttgagcatcttttcatgtgcttattggccatttgtataccttctttggagaaatgtctgtcctagctcattttttatttttcatttatttttggggaatggggtcttgctctgttgcccaggctggagtggcccagtcatggctcactgcagcctcaaactcctagacccaagcagtcctcccacatccacctcccaagtagctgggactacaagtgtgtgccactacacctgactagtaaaattttggggggggccacatgtggtggctcacacctgtaatctcagcagtttgtgtggccaaggtagaaggattgcttgagctcagaagtcaggacaatcctgagtaacagcgcaactccatcactataaaaaaaattttaaaattgtccaggtttgctggctgttatctgtggtcccaggtacttgggaggctgaagtggaaggatcacttgaacccgggaggtagaggctgcagtgagctgagattgcaccactgcactccagcctgagagacaaagtgagaccttgtctctttatgtcacccaggctggtctggaactcctggcctcaagcagtcctccccgctcagcctcccacagtggtggaattacaggcatgagccactgtacctggccttccctattattgaaatggatatctttttgttactgagttttaggaattccttatatattatacatattaaacctttatcagatatatgatttgcaaatgttttctcccattctataggttgccttttcactttcttgataatgtcctttagatgcataaaagttttccattttaatgaagtgcagttatttccaagtctttgatctattttcagttaatttttgtatatgacatgaggtaggagttcagttgcatttttttgtttgtagaaatccagttgtcccactaccatttattgaagagtctgttttttccccattgaatggacttggcatccttgtcaaaatcaattggccatcaatgtattggattatttctggactctcaattgtaaattatattccattggtttatatgtctgtcattatgccagtactgaacaacatggttgtctttgtagtaatttttaaaattaggaagtgtgaatcctccaacttttgctttttccacattgttttggctctttgggtcccttaaattgctatataaattttaggattaccttgtcaataactgtaaaatgggaaggtaggatttgataaggattgtgttgaatgaacctgtagatcaaactggggaatagaaccatcttaacatcgtaactctacattttttaagatcttttaaaatttctttgagcaccgttttgtagttttcaacgtacaagtcttttcccttccatgactagatttattctctctctctctcttttttttttttttttttttttgagatggagtctcgctctgttgcctaggctggagtgcagtggctcgtactcagctcactgtaacctctgcctcccgggttcaagcgattctcctgcctcaacctgctgagcagctgggattacaggcatgagccaccatgtctggcaaattttttgtatttttgtagagacggggtttcaccatgttggccaggatggtctcgaactcctggcctcaagtgatctgccagccccggccccccaaagtgctgggattacaggtgtgagccaccccgcctggccagatctattcttttaaatgacaattatcaatggaattgttttcataatatcctattaggttatttttgctagtttataaaaataaaagtgactgagttttgattatgtatcctataactttcctgaatttattagcttttgtagctttcttatataggatcatgtcatctgtgtataaagatgcttttctccccttcaactcagtttcctttttttcttttccttgtctaaatactctggttagaaatttccagtacaatgttaaatagcagtggtgaaagcaggcatccttgtcaagctcccgatcttaggagtaaagcttttagtctttcaccattgtcaccactgagtatgatgttagctgtgggtttttttggttttttttttttagatggagtcttactctgtcgcccagtctggagtgcagtaatacgatctcggctcactgcaacctccgcctcctgggttcaagcgattctcctgcctcagccttctgagtagctgggactaccggcgctgtgtcatgactggctatttttttttttttttgtatttttagtagagacggggtttcaccgtgttagccaggatggtcttgatctcctgacctggtgatctgcccgccttggccttccaaagtcctggggttacaggcgtgagccaccgtgcctagcaactgagggtttttaataaatgccctttatcatgttaagataattcccatctattcatagctttctgattgtttttatcatgaaagagtgttagattttgtcaaatccattgtctgtgtcaatttggatgcctattttctaatatgtcattttgaaatgcaaatctgttgagttcattccactactaagaaggttgtgttttttgtgttttttttttgttgtttgtttttttaatatatattacgctctgaaccaagtagcatacttctgtggcctaattttttttttttttttttttttttttttttgagacggagtctcgctctgttgcccaggctggagtgcagtggcgcgatctcagctcactgcaagctccgcctcctgggttcacgccattctcttgcctcagcctcctgagtagctgggactacaggcgtctgccaccacgcccggctaattttttgtatttttagtagagacggggtttcaccatgttagccaggatggtctcaatctcctgacctcgtgatccgctggcctcggcctcccaaagtgctgggattcagaaaaactcttttttttttttggagacaagagtttcgcttttgttgcccaggctggagtacaatggtgtgatctcggctcaccgcaacctccgcctcccgggttcaagtgattctcctgtctcagcctcccgagtagctgggattacaggtgcgtgccaccacgcccggctaatttttgtatttttagtagagatggggtttcatcatattggtcaggctggtctcgaactcctgacctcaagtgatctgcctgcctcggcctcccaaagtgctgggattacaggcgtgagccactgcacctggccagaaaaactcatttctacatttcccataggttgtttaaattgttattattaaaggaaagctcatctcaaagcttcctcaacaacaaagccttttatcttccaccccacctcccacgcattcactgcccaaatataccaagtttctcttttcttttttctttttttttttttttttgagatggagttttggtcttgttgcccaagctggagtgcaatggcacaatctcggttcaccacaacctccacctcccaggttcaagtgattctcctgcctcagcctctcgagtagctaggattacaggcatgcaccaccacgcctggctaattttgtatttttagtagagatgggttttctccatgttagtcaggctggtctcgaactcctgacctcaggtgatctgcccgccttggcttcccaaagtgctgaggttacaggcgtgagccaccacgcccggctctcttctttttgttttttgtttttgttttgagatggagtctcgctctgccgcccaggctggagtgcagtggcgtgatctcagctcactgtaacctctgcctcccgggttcaagggattctcctgcctcagcctcctgagtagctgcgattacaggtgccaccacgcccagttaatttttgtatttttagtagagatggggtttcatcatactggccaggctggtcttaaactcttgaccttgtgctctgcctgcctcagcctcccaaagtgctgggattacagatgtgagccaccatgcctggcctctctcttcttttatctgtagtaactttttacatgccttatggtatctaaccataaggcagtgtgttagaatataatattttgtattaattttattttaaaaatattttatattgataatggttacatatatattcatatagtttctatgtgtctaaatttgggttgtatatgtaagatttttgcactttatatagttatacctccagttttttaaaaatataaatcttaagtcgtgtgtggtagcacaccctagagtcccagctatgggactactgaggtgtgaggatcacttgaggccaggagttagtggctgcagtgcaccatggttgtcttatgcataatcactgcactacagcctaggtaacatagtgagactcccatctctaaagacagaaagaagttaaataaataaataaatcttaccttccatgttaggctaagtccaagagataagtcactgtattttacctaactttatcttttctattgaattgtgttctgtattgcacatggtgggcaatccatatgtgtatgaattaacctaaatgtacttgtggattaagttgtgttaagtttatgaagcaaaatataatagccatagtgggaagtcattctaaccataccttgaggatgttaacatttgctgcgaggcatatttttggtttatataagtcatggttattgacatagcatctatctgagtagatattaagcaaggttagatattttttcttcctttttatgtactctaggtacacagatatatctgaaaacaaagggatatatatttggctgcttctaagacaattgagtcttgatttattatgtttgtctttttttttttaagatggagtctcattgtgttgcccaggccggagcactatcttggctcactgcaacctccgcctcccgggttcaagcgattctcctgcctcagcctcctgagtagctgggattacaggcgcgtgccaccacgcccggctaatttttgtcttttgtttttgtttttttgagacggagtctccctctgttgcccaggatggagtgcattggcgcgatcttggctccctgcaacccccacctcccaggttcaagcgattctcctgccccagcctcctgagtagctgggattacaggggagtgctaccacgcccggctaatttttgtatttttagtagagacggggtttcaccatgttgttcaggctggtctcgaactcctgaccttgtgatctgcccaccttggtctcccaaagtgctgggattacaggcgtgagccaccgcgcccagccaatttttgtatttttggtagagatggggtttcgccatgctggtctcaaactcctgacctcaggtggtccacccgccttggcctcccaagtgctaggattacaggcgtgagacaccgcgcccagccccagtcaattttttatcaggattgtactataggaatagtaagtcttctcactagaaaatataccttggagattggtcgaaataaatattatattttaatgttcctaagtaaacatagggatcgtttgtttcatcaggattgttctataggaatagtaagtcttctcactagaaaatataccttggagattggtcaaaataaatacttttaaaatgcttaattattatttatctttgatgttgaacataaaaagcagaattgttttctcctttgatgaagaaacagtttctaggaataaaggaaactttagaaccgatgtccctttttgtacatcactttttgagtatttactgaatgtaatgtttgtgtcttgtagaatggagatgtatgcatttcgattcttcatccgcctgtagatgacccacagagtggagaactgccttctgaaaggtggaatcctactcagaatgtgaggtaaggaggaatctggttttggagttattcttaatctccttattgtctttgctcctagtaaaataaaattatgtattgtcttttaacatgtaaaaaatcatctttcttatattcagtttctttgtctttagctagagctttaagaaatatgtatgcgtcattttgaagagctgtatttactaaacaataatgtatatgattctcatttccctatgttcacttaggaatagattttcaagcctgaatccctactcttaacttatcctagttctactctggttctttattaccacctaacattagtgtcattcattggttgcagttaataaacaatgttaattcattataagtaactgaagtccatacgctttcacatttcctttgtttttacctgtcgttgttttgctccaaaatatttcatacatataaatatatatctatatatgtacgtgtatacatatatgtatttaaattttttgtagagatggggtctcactaagttgcccagctggtctcaaactcctggcctcaagcagtcctccccacttggcctcccaaagcgctgggattataggcatgagccactgtgccctgctcatcacattatatttaatagtcatgtcttcatgggcaactcctctctctctctgtctctgtctctctctctctctctgtttctgtctgtgtctctgtctcttgtctttgagacagtgtcttcccgtcacccagactggtgtgcagcggtgtgatcacaggtcactgcagcctcgacctcctgggctcaagtgagcctttcacctcagcctcccaagtagctgtgactataggtgtatgccaccatacctagctattaagcaactcttgattataaattttcttgtttttgatgacaattttggggggtactgatcaggtattttgtgcaatgtcccccagttgagatttttcttatgtgttttctcatgattagtctagggttataggtttgggagagaaagaccagagaagtaatgtgccattttcattatgtcatatctgaagtatttactatcagtgtggcttatccctgttgatgggatacctttcatcacctgcctgaaataatatttttagcttttctccactgtaaagttgctctttcctgaacttttcattctgtactccttggaaggaatatgcatagcccacaactaaggagagggtggctatacctccttgaagccagggtatctatataaattattttgaattcttctgcatggattgatctattcttcccctttatttgtttattcaatcatttgttaaacatttttactgatacaaaaactaataacttgattagaatctccaggtttatcaaaagtgaagaattggaagcttcctgacttgtaatagaagctcttcaagatgtgtcaaatgactgttgattatgtttgttactcattcctttgggtaccttgttccatccaatttatttagaaagagttgagaaaatagatatattaaagatttcagcatatcttaccaatatattttttaagacaaaaaatgttactttctttctaaattcaaataaatgtgtttttacacctcaccttgacaaccatcatccctctgaatgtttttttctcatatttctttttttttttttttttttaagacaggatcttgctctgtcgcccaggctggaatgaagcggcgcggtcacggctcagcacagcctcaacctcccgggcttgagcaatccttccactttagtctcttgggtagctgggaccacaggcatgcatcacggtgtctgctcaagattttgtattttttttgtagagagatggggttttgctttgtttcccaggccagtctcaaactactgggctcaagcaatccacttggcctcccagaatgctcagattataggtgtgccccaaagcacctggactaatttttaagttttttgtaaagatggggtctcaccatgttgcccaggctggtctgaaacccatgggctcaagtgatgcccctgcctcagcctcccaaagtgttgggattacaggtgctcacactacacccgccttctgaatctcttatctatacaagaataatacctacctcagtaggttgttgatagaatttaagtgaataatgcatgtaaacctactagaatggtggatattacctggctggcttgggttgcagctattattttcaaggaattttttgggtctaatgtgaagcagtcatttgctatctattagaagagaaacacatttcttagttcctcatatttatttcattttgctacagggagacataattgctagatgcctgtatcgtaaccagttcaagtagtacataatttatcttgggttctaaatacatgaaaagaactaaaataattgttttgagctgtttttgagatattctgtaattgagaatacgctttctttttttgaggggaaaagtgtcctacgtagcaaattatgtatacatgaattatctcgatagactcaattttaaattagtattaaaaattctgagttgtaggccgggcgcagtggctcacgcctgtaatcccagcactttgggaggccaaggtgggcagatcacctgaggtcgggagttcaagactagcctgaccaacatgaagaaaccctgtctctactaaaaatacaaaattagctgggcatggtggcacctgcctgtaatcccagctactcgggaggctgaggcaggagaattgcttgaacctgggaggcggaggttgcggtgagccaggatcgtgccactgcactccagcctgggcaacaagagtgaaacgctgtctcaaaaaaaaaaaaagtctgagttttatgtattctatattactcaagagtatgtttgagggtgctacgtcttcagaagtaattgtagcacattattttgacattataattagacaatgtgtataaaagtttttaaaaaatattttggatgatttgttgaaaaaattgcatccaaaaaaatccccagttgtactttaataatgattctggtgcatggattttcaggacgagtaataaccctagattagaggaagtggtagctataatactggtgattcttggttttgctggttgaacgttgaatcaaatgcttacaccctctccctatttgagaaaataagcttcccctttcctcaaatacaaagccccaaacaagattttcctcattgcatttttatgctgcttggctggataatgtattgccaccacccatgggaattcaggctttttatcctttacttctcttgcatttacacgcaaatgatgtcatttgccttatctcagcttaaagtattatgaacattttttcttttaaaataggcctacttctcatgtaatccagtcttttggaggcagaggattccttttatacttatctgcccatctgaaactgcctttgttactttgggtactagcatcattttgtttcctcacacttgagtccccaggccacctgagccacaatttagggacattccccatactcaaatcaagattgttttccctgcttttatgctgctttgtttagaagcttcccaactacaactagttatgtggagttacacctaacatcttcacacagctctacaaggtatttgggttggaaattgtttaccttcttagactttttatcacttagttctatgtaatcattgggtagtccttcaacattttgatcttattggtgttttcgggggctgtgggatgttttgtacactttttggaacctcacctgtctggaatacctggtggtgctcagaactctgagcggaagtcaggaaagcactacctaatgagcagatgtggaatactttcgcttatcccttttgtttctgtgttcacttggttgtgagacaagggaggttttaaagtagtaaactgttatattttctaacaggtcatttatggcactgaaatattaagagggaagatacaagatgtagtggaaatgggcaactattttccttcttgtacctctctgctgctaaattatctagggccagcaactgtctaagggttctgggctccatgtccagtttatgggtggctgtagtaagacagcagtggagatggcatagggttcatctcatcctgttttggagtcttatctgctgcctctcactggcatctgaaagtgattccatattcacgtatttggttttcttctccataaccacgtgtactcaagactattgttcagcacctcaatggacatatttataacataaagtggcaaatggagcacttttgtaacttgaagaataagggactccagttaccttcaagagtctaagtcagtctgtattatcagatctggtgagtagtgagagttagccaacctgaaaaggaagaattttagggatgcagagaatcagccaactggtgttcactaaaggctcggtagcttgctacctcttgggaaaaccagcatacttcttttgaaagaaaacatccacaggcctcctcctcccagaggcccaggattaaattggtggggctggaggtggtggggagagtttcttcctgaattggaaagttttaaggagtaggcatttgtcagcaagaatggagttgggagttgccacacgtctttgattagaagttcacagcattatgcctcttcctgatggaggaaacaaaatgtgccttaatacatgatttgtctagaatgatgtgggagctttggggatagggtagggtgggagtgggagtagcaaagccctcagactttgctatagagttcacagctgctttctgtgagacaccatccccagaactactatctgctataggctctgggatggtgaagtggtcttggtgtggatttgctttatgttgaaagaggcatacataatgttttctttttcaatttcaaaaataaagcgtgaaaccaaatttattaacccaatcaagagaggctgttgtttggtataaaagagtctgtctcagaagtggggtaggatatttttctgtctagtcttaagaacagagagccagagacatcacccctagcattgggtgccaaagtaagcacagtcaggggaaacaggcataaccatgctgttcctaaagctcttttaaacccaattctggaacagtgtggttttatttatttgcttccttggtttttgtgcatggggtcccactgccctcaacctgccaattccattctctgcagatgatacataatttgggcatttaaaaactgtagttgtattcctaccttgcattctcagggatacatcagtcagcagcagatccagcactgcacagaaggaggtgttatatttgttggttgctttagcagcctaaagagaaactttataataatgtaaacccgttaagctactatattttaccatcagttgccctgttttccctatcataacaggcttctttattctttgtcatgatgtcctctttaaatccctcccccacattgaaacatgcaatgaggactgagctttaactagtcatctgtagttactggcccatcctttgatagagtggaaatgagagattttaaggacccaggacaactagaaaggtcagggtagaacccagagtcagtaagagtggtagtaacagtatgcaggatttaggtttggctccagagacctggacttcacacatcaactgtcatcacattacgctgggtctataaaactcaatatctaaatcaatctgcgtgtgtgtttgtgtgtgtgcacatgtgcatacatgcatgcttgcccatgattatggcgtgaagtaagttcaggttttgttgttgttgttgtcgtcgtcgtcgttgttgctgttgttgttgttgttgttgttgttttgaaatggagttttgctcttgttgcccagctggagtgcaatggtgcgatctcagctcactgcaaactccgtctcctgggttcaagcaattctcctgcctcagcctcccaagtacttgggattacaggcatgcaccaccatgcccagctgattttgtatttttagtagagacaggatttttccgtgttagtcgggctgatcttgaactcccaacctcaggtgatccgcccacctcggcctcccaaagtgctgggattatacttgtgagccaccacacctggcataagcttagattttttggtttttaggaataagccctttctacttctcccatgctgtctggagggatgatatatacatgggaggtgggaccaggggaaggtgccagtctgtaatccttcaaaattatgaacttttcttgcttggtttccaggcagaccctcgagccaggtcttatttgtgatgctagggctatcacaaccctgttaaagttatgcttatggtgacatagtagctaacagagaaagggttatcgacatgttgaaaatgggcaaatggagtattacgcattgggtcatacaatcctaatttccaatttcccttaaatacttctttaggccaggcgcagtggctcatgtccttaatcctagcaacttgggaggccaaggcaggtggattgcttgagcccaggagttcaaaaccagcctgggcaacatgacgagattccatctctaccaaaaaaattagccaggcatggtagtgtgcacctgtagtcccagctactcaggaggctgaggtgcaaagatcacttgagcccaagtggtcaaggcttcagtgagctgtaattctgccactgcactggagcctgggggccgggtgagacccaagtttgctttgtcttttaaacacatatgagctctgcagaacttcacagcttgatttgctgttggctagtctgcaatatatattatatatgatgtgttggtcttcattttctttgagggtttttattgtttacaaacttattttttattcagaacaagatagctaaataacctctgaccaaagataactgaagcaggcaaaaggatctgaaatatgaacctcaagactgtaaagtgaggtgcttttgcctgtcctttttttctgtgtttcctttctcttcttagcatttttctcttttggcctagatcctctatcctgaaaagacctatcttattgcctcgctgtggcataaagaggggcagaaggagcacatttatttctgggagtatctctaactccttgaatggtggcagtgggaattgtgtaatgaaccacagagactaagaactctctggccctcattcttatcccaaattccctctaggtctgttctttgttgtaataaatgttaaacatgtattctgctggattgagatagatcagatctgttcctctagacgtggagtagagaagggtggtgcaccagtgtgttcttgtggaggggcggggaaagcaaagggtactacagttattctttataggaaccgagagtctggggatgatgggccctcagggtctattttgctagtccaacctcttgtttctcctgagaaaatacagtaaatgaataaggattttaaacacttaaactcattttttaaacaaaaaaatgagctagcagttgaaatagttttttgttttgttttgttgttgtttttttttaagacagagtttcgctcttgttgcccaggctggagtgcaatggcacgatctcggctcattgcaacctccacctcccgggttcaaacgattctcctgcctcagccttccgagtagctgggattataggtatgtgccactacacctggctaatttttagtagagacggggtttcaccatgttgcttggtcaggctggtcttgaactcccgacctcaggtgatccgcctgcctcggcctcccaaagtactggggttacaggtgtgagccaccgcaccccgcctgaaatagttcttaaattcaaattcaattttgtgtattccaacagtattatctcagcagtttagttttttccagttcacatccatccatctgcctgaggagaccaatgctgtcagctttccttattctcacaggtgtccatctaatcaagaatagttcccaccaggcttctgattggcccaggttaggtcacatgcatatcctcaaatgcatcgccataacaacagggatggaatcctttcagcacttgcttggtcttatgtctactgctgtaggtaggtaggttgtttgtataggaggtgtggcacaatggtaggagaaggagattattccccatacaaaaaagaaaaagaaagattctgctcttcagacagaaaaaagatcctgctcttcagacagaagaaaacttactgggttgacagttaccactatattagtctgctgtattactcagtgcctcttaaaacatcctggatttttaacttaggaggacatggaattagaatttctcattttgttagatatggatgatttaccatttaaaaatttgtttcccaatatacacatcatcttaatacacaagatgtaagaaaaccaactaggtgaaagtacttgtgggaattttttcttaattcaagtaataggattcatctagatctgtgttgtccaatgtggtagcctctaactacatgaggctttttacatttgaattaaaattaaatactagtctggcacagtggcatgcacctgtagtcccagctacttgggaggatgaggcaggattatcacttcagcccaggagtttgaggctgtagtgtgctatgatcacgcctataaatagcctctgtattccagccggggcaacatagtgagaccctgtctttaaataaataaataaataaatattaaaattcacttcctcatttgtgcaggatacatttcaaagtgcttagtagctgcatgtggctagtggttactgtattgcacagcataggttatacattatcatcatcatcatcgtcgtcgtcattgaaagttattagtacacagtactgatctagacaattaaacctatttttctggctgggcaaggtggctcacgcctgtagtcccacaatttgggaggctgaggcaggtgaataacctaaggtcaggagtttgagaccaccctggccaacatggtgaaacccatctctactaaagatacaaaaaaatttggccaactgtggtggcgcgcacctgtaatcctagctacttgggaggctgaggcagggaaatcgcttgaacccgggaggcggaggttgcagtgagccaagatcacaccattgcactccagcctgggcgacgagtgaaaccccatctcaacaatcaataaataaaaatttaaaagcactgtttttccagctaggagcagtggctcacacctgaaatcccagtacttaaggagtccaaggcaggaatattgcttgagcccaggagtagagacggggtttcaccatgttagccaggatggtctcgatctccttaccttgtgatctgcccacctcggcctcccaaagtgctggcattacaggcgtgagccaccacgcctgggcttcttcgattctttttaatgtaattactgaagaaatccagaaagctcttgagggaggaaggccaaggagttatccttaacctaataggagcatgtgtgatcaatggattttaattagatagaaatgttttctttgaaaatgcctttgtcataatcttgtataaaatcatgtaacagaaattcttcgcctttttaaggaaaagttttcatcaaatcaaacatctaattgcctggtttcctccctttatttttggcttggggcccagagcaaaagggtattttacaacaacacaatctctaacctttcatcaatgagaaaagatagagaaatttcatttttcctcccattttctcctaatgcacataatttttagggggaaaaagcctaggagtaatttggaacagttttggagcctattacgcttttatttatttatttatttttgagatggagtcttgctctgttgcccatgctggagtacagtggcgtgatctcagctcactgcagcctccgcctcccgtgcccaagcaattctcttgcctgtctcagcctcccgagtagctgggattacaggcgcctgctaccacacctggctaatttttgtatttttagtagagacggggtttcaccgtgttggccaggatggtctcaaactcctgacctcatgatctgcctgcctcagcctcccaaagtgctgggattacaggtgtgagccactgcacctggcccctattatgctttctaacataaactttattccctgattatttggaatgtctaatttttatctgtggatgaaaattggccgtttgtaacacccactagatttgtaagccatgggagaccagggatggcatctaacttgctcaccattgtacatccagcatctcacttggtgcctctggcacacagtaggtacatagtaaatacttttgaataaagatttctattattcagagactctagttcttctgtttgaaggattttgcttttcctccattctcctgcattactctgtcttccttccaagtatggaaaaaatacatttggatgtagcactgtttttcaggttaagaggccacaataaaaactggttatatagggccaggtgcggtggctcatgcctgtaatcccagcactttgggaggccaaggcgggcagttcacttaaggccaggagttcatgaccagcctggccaacatggcgaaaccctgtccctactaaaaatacaaaaattagccaggcgtggtagtacaatgcctgtaatcccagctactcaggaggctgagacaggagaattacttgaacccaggaggcagaggttacagtgagctgagatggcaccactgcactccagcctgggtgacagagcaagaccctgtcaaaaaacaaaacaaaacaaaaaaacggccgggcgtagtggctcatgcttttaatcgtagcactttgggaggttgaggagggcggatcacctgaggtcaggagttcaagaccagtctgaccaacatggagaaaccccatctctactaaaaatacaaaattagcagggcatggtggcaggcgcctgtaatcccagctactcgggaggctgaggcaggcaggagaatcgcttgaacctgggatgtggaggttgcgatcacaccattgcactccagcctggggaacaagagtgaaactccatctcaaaaaaaaaaaaaaaaaaaaaaaaaaaaaaaaacctggttatatagaatagcatcatttttaccagctcccacatcaagattgccttgaaactaaatattttaagctttttcccccatgccatttaatttgtaatttttaaaataaacagtatttgaaagcttctaagacatctgctttctgtaggttggaacatgtgaccagttgaaacagggccttctatcaagttcatttttatgctttgtgcattacccttatactagaatcacttgtgcattacccttatactagaatcacagatttcctctgctttgcctgccagttagcagcttgtttcttagtgctgaaaaaaatttttttttatttttcttaaatgccttttatgaaaactatcaataaaaaatttatatctctattcccccaaggtcttaaatttaattgtatcagaaaaattttaagggagggagaatttgaaatctgattgtactatcttaaaaagcagaatacttttaaatactgtaaatatgggtattcatagctgatccttttttcctgtttctaggactatcctattaagtgtaatctcactgcttaatgagcccaacaccttctccccagccaatgtcgatgcttcagttatgttcaggaaatggagagacagtaaaggaaaagacaaagaatatgctgaaattattaggtaaggtttttttttttattacctcaagttatacaaaaccaaaatatattctggaaccaagggtttaaatcaaacttaaatatcctgtccattccaggataattttcctctattagatttatagtgtgggaagagaagatttctgcctgagcctaaagaactttgctgtttaccgagagaacagccactagaagataaggcagtagcagacctgattttctaggaaccagaacttctaggttctggccaggcatggtggctcatgcctgtaatcccagcactttgggaggctgaggcaggcggatcacctgaggtcaggagttcgagaccggctggccaacatggtgaaaccctgtctctactaaaaatacaaaaattagccaggtgtggtggtgcacacctgtcatcccagctactcaggaggctgaggcaggagaattgcttgaacccgggagttgaatgttgcagtgagctgagatcacaccactgcactccagcctgggcgacagtgcgagactccatctcaaaaaaaaaaaaaaattgaataaataaagccttccagtttattggcattcctgaccatagcagcaaggattgtttggaaatcctcattatcagcaacactaatgtatggtataacagagccctagaataagattcaggggacttggaatctactcatgggaccatttatcagataatttttggggtcttttactttctcctctgtataaaatggaaaaaagcttaacctttaatctcttaggacatcaggttcttataatagtacccaagaaatttgcaataaatacaaaccctacacttcccctaccctccacctcttttttatttgtttctaattaattttttttttctttttgagatggagtcttactctgtcatccaggccggagtgcagtggtgtgatctcggctcactgcagcctctatctcctgggttcaagcaattctcctgcctcagcctcccgagtagctgggattataggcgcctaccaccatgcccagctaatttttggatttttagtagtgacagggtttcaccatgttggccaagctagtctcgaactcctgacctcatgatccacccgccttggcctcccaaagtgctggaattacaggcgtgagccactgcactcagcctcctccacctctttttaaagaaacagacatggtcttactctgttgcctgggctggagtgcaatggtgtgattacatggtaacttcaaattcccgggctcaggcagtcctcccacctgggcctcctgagtaactaagactataggcatgcaccaccacacccagctaatttctattattatttttgtagagatgaggtcttgctgtgttgcccagcctggtcttgaactcttggcctcaagtgatcctcctgcctcagcctcccaaagctctgggattataggtgtgagccaccgtgcctggcctccaccccccttgatattacatttttatttcttaaaatagagaccccaaatacagttacagcttcctctgtgcataggagttgactaagcattggcatttatacaaataagaataaaatctagttggcttgagaccatgtgatatgaaaaaagttaaaacaatgctgggaaaggacatgaggtgactgctgagtaatataaaatcagcagttctaagttttctgcccattgggatcacttttaaactgtccctaaacaatagctgtcttttatgggattacaaggacagagtttgggcatctgtgtgtgtatatatatctcacctaggtgactgatgtgtaccaaacattgaagataattagtagaaatattaagatcctacagaaatttagaggagtgggagtgtactaaggattgaaagatcagaaagcttaggtatacatattcccaaggtacttctatatatttcttaatttgtttaagggtccgtttatctcattctatctattccttaatgacctagtacagtacctgacactaagcaacagctttgtgttaggtactcattaaggcatagcctgtctccttagggagctcactttattagcatttgaaaacaaatgaccatgtagtattatacctatagaagcctaaacaagatacactgggagaaatatataatgtaatagatttcctagcagagataattccttataaccaatactttttcaggtgaaaaaagggaaaatacccatgtttgctaaaatacaggagtataacagcatgacatgttaaggggattacaaatgcttgagtgtaaattctgatgtgggaaatattagaaaattaagcaagagaggcaccagggtcttcaaagacattgaagtcatgataagagtatggttcttaatgtaagaagtgatggggtaccacttaaatatttttgggagggaagaggtgatgctatttgagttctgataaaagaattggctgcctggtgtggtagctcacacctgtaatcccaacattttgaggcgggtggatcacctgaggtcaagagttcgagaccaacctggccaacatggtgaaatcccatctctaccaaaaaatataaaagttagttgggcatagtggcacacacctgtaatcccagctactcgggaggctgaaggcaagagaattgcttgaacccgggaggcagaggttgcagtgagctgagatcgcgccactgcactccagcctgggaaacaaagcaagacaccgtctcaaaagaaaaaaaaaaaaaagacagtcagctgggcacagtggctcacgcctgtaatcccaggactttgggaggccgaggcgggcagattgcttgagcccaggagtttgagacaagcctgggcaacatggcaaaataccatctctacaaaaaaattagccaggagaggtggcttatacctgtaatcccagctacttgggagtctgaggtgggaggattgcttgagctctggagccagaggttgcaatgagctgagattgcgtcactgtgctctagcctgggtgacagtgggagaccttgtctcaaaaaaaaaaaaaaaatcaaatagttggccaggggaccaacatggactaaactgaggtagtagtaatggggatgaggggacagatataaaaatatttaagctgtaaagcaataggtctttggagtgagatttattattttaagaagcaatgctcatttattcagagaagtaaaatgggagaaactgtccatagaggtagaaaatgcatatgcagtctacctctgcatatggaacattaggacagaggcttccaaaaggcatttgtttatataagccaagagctgtcagcataaagggagtggtggttaaaattatgggaacagagatgatgtcccagggagagtgctgagagtgtggagattgaagcccagaagcctcaggaccatcaatattcaaagcaaggcaacagaagaaaagcttcaagcacaactaagagattgacattaggaagatcaggaagagtggtctagtcttgatgactcaaatttttataattgttgaaggaaacaatttattgtttgttcattcatacaatcagtatttattgcacacctcttatgtgccaggctatgtgctaggcactgactggggaaatgggactaagaaagacatttacgctcacattcaaatatgtggagacagaagagtgagcaagcaaaaaatactagatagtgctaagtaggataatgtgaaagaatgactagatggctgctttaaattgggttgtcaggccaggccttctctaaggtgatatttaagccttaatatctgaggccgtgattctgagtgacaggaaggagccaggcatgtgtggggcaggggaagagcaactggtccagacagaaaaatcaacaaggtgtgtccgagatgccaaaaaaagaccagggtgaatgtgttgaagggctggagaaaatacaagagtgggtcatgtggccgggtgcagtggctcatgcctgtaatcccaacactttgggaagccgaggtgggcagatcatgaggccaggagttcgagaccagcctggccaacatggtgaaaccccatctctactaaaaatacaaaatttagcccggtggggtggcgggagcctgtaatctcagctacttgggaggctgaggcaggagaattgcttgaacctgggagatggaggttgcagtgggccgagatcacgccgctgcactccagcctgggtgacagagcaagactccgtcttgggtggggaagagtgggtcgtgcaagacactggaatctggcataggcatttgaattttactgtcagtgaaaattaagaggataattaaattaagaattgttggggcacttgagtttggtggtgaggtgactaggccaaaaccctagccaatcccctaagcaccccaccccacattaaaccagagtgggacgttttattcacatatgcaacctttatgatctagccccaagaaactaggaggcgtattagcccttctattatctattcttattctggcagttatccctgtgcttcacacatgcaaacaacaaagcatgacattccgcccactaagtcaatacctgttctgattcttaagtcgccgacctattggcccttacatgaatcggaggacagccagttgacgaggtgattctggctataattgatccactgctttaaactcccttgatattaacagtgtatttcccctcctaaaaagtcaaagtttacttcaaaattgtacccagtgggttgaaagcatttggtgtagtacagggtatctgtcagatgctttcaggcaggtactgaagtttggagagctgagtcataagtaatattgattatttaaggccaattataaatctgtcttaaaaaaagacttaccgtaaaccatttctgtgtcaacctcccttcaggaaacaagtttcagccactaaggccgaagcagaaaaggatggagtgaaggtccccacaaccctggcggaatactgcatcaaaactaaagtgccttccaatgacaacagctcagatttgctttacgacgacttgtatgatgacgacattgatgatgaagatgaggaggaggaagatgccgactgttatgatgatgatgattctgggaatgaggagtcgtgacgtgctccttcagtgcccctgtactgccctgccatctcaggccaaagggaggggagcaagtggggacctggccatggcccctcagcaaaaacctattcacagcgggtggggaaacacacacagctcctgctgactccccttatggatctcagtttgctcctttttatggacctttaatggagagagagtaaccctccacagaatgtctgaattcttgcattctttacccttccatcactatattgattctttttttaaaaaatatgaacccaaactcccgcctcacttcgtctctacagaatgttcacagcaaaacacgtttggtctgtttttagattcttgaagaattcaatagtctttcaagatgtttaatgtgtttaaagctgggaacctgttgggagttcacaagtgctgcatatactgggtagcaaaagaaaatggaaaaaaacccacaaaacaaactttaaaaaaaaaaaaaaacaaatttgccaaggtttagctgctcatttacattagtgtgtgtgcattcgttcagccccatggtggtgaattctgtttctttcctttcctaaggctgggacatggtgggcatcagggactttgtgctaagcctgatgaaatgtgctccttcaatctccatgaaaccatcgtaacatggaggcctcagctgctctgaggagagaaatcagactttgttttttgaaatcgattgggatcgaaagcctgaaataaatattcatactttccatagaactgagcacttggttgctatttattttaaaggcagggttatttccccccagggagtggggcaagcggggaagttgggatgagtgcgtgtgggagcaaagagttaaaaatcactatgctaagtttggttgatgctactggggggaaaaagttgaaactactggtgaccactgttgggagaggaaacatctgttttatagatttagcatggccttcccatcaaaaatacactcgtaccatgacgttttgtttttgttttttaagtagccacttttaattactcagtattaatcctaggtgcatgtgttaagatttcggttttcatcgagctgcttatactgatagtgaaaaacttggatgtgtgtgagacgagttaccgccttcttcattggatgtgatctgaactttttttctcctttcaacatacttaggctgtggagtgcaagcagaattatgcatagaaattgtggcagggctgagggagttgactgcaggcagtttttaggccagataaggctagatcttcctgcaatgcacttgctgcagctttgattttccagatctcaatcgtgttgcttcaatcaatattgagatccagcagccttcaccatccaggagacttcagaacttgaaggtaatttttggttgttatgggggtgcaccagatcataggagggcattatttggaggaaaccgctataatgtaaaatcagatttcagaaggaaaatgcagcaaggactgactgtagtcctatttcagacccctgggcactagtgtcaactcctcctttggctcgtaactcagaaagaaccaaagggcagattagggacggggcaggagggatcctaggatggccagagtaggtgacgcttacttccttagctcctccttccattctgatctcagggttttcactcttcaaactcccaaacacatgacttcttcccagcagcccttcccggcctctaaagtttggtcccagcagcccttcccagcctctaaagtttggtctggtatgaaatgggactgtttaacaagcaaggctcttaggggacactgttgagcctggtcccagaatctgtgatctccacagggccagggttgctacttgcacccagaatctagtgattttagtcagatccatggaacagagcagcttcgtaatacattgtcaagttacctgattacaaactctcatagatgttggaactacctttttactccccatactttgtaagtaatgcttccagattaacctgcaaatcttgtggagccaaagcctctcacagtgctgatttacctcccccaaaatgcccccaaacccccatgcaagtttacagccagtagcttggtcttattctcttggagccctaaaattaagcctttcattcccctttgctaaagcatctcactcccagggcagccccagcaccctggcattgcgggaggtgctctgctgcacagctgttccatcaggccctattggcctctgttagacattgactcagggagccggagcgccaagtggaggttgtacctttcagccctttggggtgttaaaagtgtcaagggctgggtttgcctctgatgagtacaatcagttccagaagactgggtaagtctcttgctagcaggtggacattctggtattttagactgactgaacgaaacccagaggctggttccagagctctgtccctgagaacacatccctgtggaaaatacttgagtttgtaattttttttcccccttctgggagtggaggtctcaggctcaatccggaaccatgtacgtacagttttgcttattatttgatgtgacatgaactcaaaatcctgcatttttagattccttttagttctaattgaggcctcactagatgctcttcagttctgtgtattttgaggctgggtggagaagtatatgattctgctgttgattctttcagtcttccccccttctccttttatcaatcattccagagttattttctattagtcaaacttttttgtagaaccttctttcccttaccctggcaaattgcttctttacttgctggtttccttacgtttggggcacatgttgtaagaaactgattggaaggggaaatgtgcagctctccactggaaaggaactctccacccctcccatcctgataaaacaaacaaggtttacatttacaactaaaaggattcagatgcaattttcaactattctgaaaccagcaggacacacctgactttaatagttttagctgaaattgtagatgttttgcttcagtttaacttatgagaaaagattatctgacggattttgtgttgacttcccctttagtggtttattttgtctttttctgcccatctgtctactaataaaatgtgaaataaaatacctgtattgctacttccccatgaa

SEQ ID NO: 4 - DNA, 419359 bp, Homo sapiens
  gene (1)..(419359): Also known as ZNF533
  ref <308>: DATABASE ACCESSION NUMBER: GenBank/AC_000045 REGION: complement(173901060..174320314)
  ref <309>: DATABASE ENTRY DATE: 2008-03-03
  ref <313>: RELEVANT RESIDUES IN SEQ ID NO: (1)..(419359)
ggcgcgggcaagagttggacagttcaggggccgcgccgggccgagctgtcgcccgcgccacctccaccgccgccgctgctaccgccaccgccaccgcctgggctgcagcagatcgcgggagaacgtctgcgcgaagccccggtgcagccctggcgggaccgcagcaaccaccggagcgtgagcaacagcttcccggctggaggagccactgccccacgcgcccgcggcccgcgcgccgaggtaagctctgggcgcccagcccagaccggcgcccccggactgggcgccctctgcttgcccggcccccgccctcctccgcagagcgagcctgcacctgggcgcgccgcccgagggaatggccaggagcccccctcccggtagagtttgcactttgtctcaaggtcccacttgtagaggagggcgcccaggcgcctgtggcttccacgacctaatcctaactcctgcgagtccctggagttaggattaggtcgtggaagccacaggagcatactcctctgttccccagggtaggctccaattcccaaggacggatggagaggggaaaggacgaggagagtgccccgctatgtttagccgcagcgcctcgtcacctgggctggaagtttggggtttgtctttctctcaatgaccgggaaatgggtagttaggggaccgaggtgtgtgaggagggtagcggtcgaagcttggggtcgtgggagagttctgcagcagaacccagatgagatgggggcagaggagcagagagaaggtccccgaagtttgcacttgttgggagccctgacgggcggcctcggccactaagcgctggtgaaggtgtcagggaagggtgggaggacactgtgggactgcggaagggacgaggagaaggggagggggaggaccatctgtttcgccactgttatgtgcgggggcctgtggggagaagggagagctggcaggacgatgcttccctagactctggaggacacacagtttttatggtgaacctggatagggagtgctgttcttcaggggaaataaattgccaagaagtatcccccctctccccacgcccatgaatacaaaataacgcagttttggaatgctctcaaaagttcttgggttgggaaacgtcttctttcattttcatacagagatgaggtttgcatttccttttggttttgctttgctgaggaatatcacaccaaggggaatgcaaactttgtcaagatgtagtagcaaaagatgttcctatagaaggaacaaaacatttctgttatagggcctagcctaaagcgtggaaactggcagcgtccacacaattcatgaaacggtaggaaatgcatttatctaattaaaaagagggcttttcataaagtcaataagctacatcttaggtaagttaaaggctttggcttgaaagaactcccttaaatgttccaaggccaaatttcactggttttcagagtcctttaatcttattttgatgccatgtgtgcgttgagtatgtgctgccccttccctgtaacagataaatgcctttagaatgcaaaatacagcattgcaagttctgttacttgaggtttttaagatgaaaaagatgcttatttgatcaaagtgttggttgtttttcagattctatattcccataaattaaatatttgtggatttataatttacactcttacctatttccaaaagtgatttgaggaagcttgggataaaaaccacaaatcagatagctattcttgtagatctccttgacctctcttggatgcatttgtagtaaaatgctttggggaaggtgaattctcctaacaaaggaaaaattactgtccatgttggaatcatcttggtgatacaatgttttgcagcatagtttcttatgtgctttgtttgcagtatattattttacattacataagtaatgatctctttatagaagtttaataaccactaagtatcatctatattgaaaaaaatgttgatattttacagcattttaacaatatacagattcacagagcaaaaagaaaacaatgaatttaatgtatttttcttcaactgaggtacaaaggaaaccaaacggaggtgtctcctctatagtcaaatcagagagggaattgtcattagtacctgtcacccaaatatggccaattagtgagacctgtcagcagctggaagataactttaaaaagtgtaactattaaatgaggatcgatcaaagcatatcaggtgctctcagcattctttttctcaggcaagtgacctgattcagagaaaaaaaaatctttcaaaacaattctgaaaggtgaaatgcctgtacagactaatgctatgtggagttgggcaccatgaaaaagacaaggatcttaagtccctggactggccaccccgcctcccctgcccttagactttttttccaagctgaatttgaagatatcattgcttgatttttcatagcaacaatttatattttaaaaattgagcaattagctaacttcttacaggagtgagtctttgttcacataaataaagggcaaaatttgctctgctgttcccataatatcctatatgtcttcaaagatctaaagaacagggagtgtgtgtctgtcccagtttcccaccgctttttatgtgtctctggtttttattataacccctccacgccgtttcattatctctattttgccaccaccccaattcctgactctgtccccactgtgtctcaatatggtctttttaccttttcttcttctttctttctttttttaaaaaaatttttggggatttctcttgatctctgtggttttatagattataggttatctcctttttgctcttttgtatgttactttttattcagttgtttctttttattagtgctagattatttcttcctgaagtgacatcctagctctactctccctccaaaattttatatttacattttgaaccacctaagagacagctttatattgctcttatgtgcctcaactctaccaggtttaagctctaattaacatctttctcctaagtgaacaagggtgactttgtgtcaattttaatatttctcctagtcactgatgaccctcccagtatctttgctttccacataaaattcacaaagtcccacagacttcatctccatgatgctttatgatgcctgcttcttcatctttctattcccatggtggctatttttttcagtcttcttatctgtttctagaggctgtcacagtggcttcctgactcgtttcccatctccattctctcccaattcatttcacacttggttgtgcagaataagcttcccaaaagagaaccaagcttaatcactggctagtaaacttttccttagtgtcctaccaagtgacatataaacccctcctcaaacagtgaagaccctctgcagtccagcctcaaagtagctctgcattttttttactttgatctcgttggttggttgatccagtcattaatttattaatttattcagtgaatatttgagtgcctactacatgacaagcacggcactaggtgataattttaaaagcaccatgtgtattggctccatgatacatttcaaatattatttttcaatgttggaatctattaaaatataatcttaaatggttggaatggggtcccaacaatcccactagctccccctccctacccttagtagtcctgaggcatcgtcatagagtcccaagtctccttgatacaatttgagacttctctaggctgaaggcagtgtttccttaacacagcaggtctctgagctctgtgtcgttgcttatgttgttccctctgctaggaagggccctctcacttccctacaattatttccacttgtcgagagagtcagtgcaattgcacatgcttcctgatctccctctgcactccagcttttgctccagcaaactctgttatattttgcttgatctcttccgtgtggactacgagtcagtgtcttcctgatatatatgtgctttgtgcattctcccctaagggcactgcaccaaccttgcctaacatgggaccttcatttcctgaaatacccagctcagggcctgccatatcataggacatcaacaaataatttaactagttggattgaattttaccgagttctgtagtaccaatttgtgtaataactgtcttttattaacacctcaacatggtttttatagtagaaccagtgcttcttaaactttaatgtgcatgtaaatcattaagaaaatcttattaaaatgcagattctggttgaacaagtttaggaataagcccaggattatgcctttctcacaagctcccaggtaattttgaaataggtgatccttgaaccacgctttgagaagcaaggtgcagtagatgatgcttaacagacttgggattttctagcagcctctgcctctctgcctggagattttcctacagtttgtttttgcttcaatattattttctattttgaaagtactgtgggcttggatatgctttctgaagctgaatggaaggtttgtttattcccttgtatttttacctcattttactgatacatgattgcagttgctagttctccttactacatttttctctggccagttgcgttgctttgttaaatattccttctcatttccctattatttgcagattgcggattgtggctgttctcctttcccactctgctttgacttttttttttttttttttgtctctgctgtctctgtttcttaaaattctcttcaggtgccttggctgactctatgccccacctgttttcctactgcttccaaaattttttagcaaaaggagcactgaaatagggcgcaggagactcaagctctccttattgctagggtgagatgttgggcacagctgtttcttttctgggctcctgtatcacttgtagatgaagggcgtgggttacttcctgggtctacttaagcactaaaatgccatgtgggatctgcacgtggggcagaaggaggagcaggttgaggggaggaaacaaaaatcttctgatgatcccggtgctgatgtatgcccccgtctggtgttcctgtttcaggttcctgttctagataaacaacttgaactttagttgttattctagcactaattgaagaaatattcttatttcttaagaaaatgaatattccctggtatcctctaatccagttgttctcactcctggattcacactgtaatcacttcaggaactttagaaaaacagtgatgctcttagccatttctaggggatggtttaatatgtcagtattttaaaaatctccccctttccagcctggatggagaactatagtacctggtctgtaaaggcagtgtagtgcggtatttaggaatgcagtgtttttccaagtcaaaccatggcttagccactcaccaccagatttgagagcttggggcaggggttacttaacttccttggctttcaatttcttcatctgtgaaatgggctgacttggttataggataatgaccctggagccagcagtagagtactgtgcacactgtggttgttcaagaaatggtagtagctgtttatcaccataatcatactattaaaacttacactcactgcattggttaagggtcatcttgccttagccaagtgaacacttttcttgcccaccctggtcagtttcaagatattcagcaccatgtaatcagtctgaaaagaaatttatgagcatattttttagaagtcagtgaaaaaatactgaagaaagtatatatactgatacaaaacaattgcccttttgcttttgatctatttggtgccacatcaactttatgatctcataaatagcagagatggattaaaagacatataaactggtacaaaagatgaccaggctttcatacctactttatgaaaaatgacttagtcttttaacaaagacagttctatcatcaacaagtaaaaaagattgaaattcatggacctaagagagcattttattttggaaataaaaatgaatgtacaaagcatttacatttctgagtttataatgggaaatggaatttaaaaataagaaaagcacacagagagagatatcctgtgctatgcaggcaaaagctaatcaactttttcttttctttttggctgagattctgaaatagccattatgttattatgttatcattatatcagcaaaacgaagattagataaatggacataaacaatattaactggggaccatattccacttttttttttctgtacacatctgaaaataaataaaagaggtgctctgtgattccagtgggcctggcagagctactcgatcatgattatcgagattgttatgctgatatcctttgcatgtgaaagaactgtagatgagtacagtttttcattgttttctcttggaataaaaagtttcatttctgtatttactttaggatcaaggacaatatttgcagttaaatcttcactaacagcctaatgtttattttccatactgtgatgtgatgtgtacttttttaataacacaattaagaagacataatgaaattttaaaaagtagtttgagctacactaagaaaaggcccattgtgagagataatgagcgaattcttctaaatctttgcttcagtataccagtgttaaaattgtgtaaaattctacagagagctgtgatttttgatttgcattagttaaagaggtccatctgacggatagtgtagtaaataaggttttcatcgtctggaggcctggactcttggttggtttatactgatttcaagccagggctcagcttcaaattcctcttaggcttaacagattcctattcctgtgaaataggttggtgcaaaagtagttacagtttttgcctttttttttttatggcagcctaataataggtaaggatatggaaatgactaccattcattcaaagacaatcattaaatcagtgtcattgtatgtttagagttaaaagagatctttgtacaaaatcctcactgataaattagaaaaatgagacccagagaatttagaatatttaaaatttgagcctagggaaattaaacattacaagtaagagtagaaaacttctggcattaacactagcatttaaacttcacagagaaatggtgtagaccctgtgatttccttagatttgatactttggatgtgaaaaaactttttctcacaggctgagggagaaaaatctaatgcttagaataagagcacaaaaatgccattgtttgtatacagatacacatactggtatataaatacagccatttcaattttatatatatgaaattttctttaaataaattagccattgcacatgttcttagacatctggaaatgctgatgattaaacacatcttagtccctgcacgtgatgcactattgaagatgggaaatagcagagcctaaatgtcgagtttggttctgaagtcatattttgtggatgcaaatttcagttctatttattagttgtgtgactttgactaagttacttaacctctctgtgctttcgtttaccaagtctgagagatataatgaaagaatcttccatggggttgtcatcagataaaattagataatgcacatagcatacttcacaaagttcttggcacctaccatactcatacaggtagccataattgtacattatacaatttaattattaatattaaatacttgcaggtacactgatttctttgccaagataacttgtgcaactctgacttttaaaccttcagtttgaaacttactaggtatttttcaattatatattttctgttttctcatctgcctttccttgtttactttaaaagaacaatgaaatgaaagagcatagaaatgtggaattctaagcactacaaggacttctgaaaatttgtaaccatgtgaagcacaggtacacttgggttcttgaacttttggaagaccaagtaacttaacacatagcttcttgtgaatgaatatgctttctgaacttgatacacatgtataaacctggaatgcttggaaatgacccaagtgagggagtgatccaggtagagaagccagtttatgtaaacagggtctatataactagggcagactcatttaaggacagtctttttttcaggcactagaattgtattaatagttggatagtcacctctcctgggttcataggcattggttttcacatctaaatttgattttctaaattggaatatagaaagaaaaataatttgtaagagaaagatataattggcaaactatggggaggattaccaaagagcttaagtccatatatacctcattactgcatgtatggttcttaagggtcaatctaactttcataggagtaaaatatttaagactcaaaatgaagaaggcaagatatagtctcattcctcttttgcacagtggtcttttctcccatgcatgtggtcatcaagctggttctaaagccatctctagtgtagtcattattggactttagcatgtgaaagaagacctgggaactggctaaagatacagattcatggaattaacccttgaaagctctgactcactaggtctgaggcaggacccagtaatctaagtaagtatcccgggtgatcgacagaccacacttggagaacactcctaccttaagttgctctgagaaatcacccacatggatcccatcatgtgtgaattctggagaaccagtctgtgctctctcattgggtattcactggcctttacttacaggttttagtccacgatgagtttccatgccaacgtgaaccactggacgcctgccgcagtatctatgtgagctcactcatggtatatggattccagggcccaaacctaaccctacaaaatctaaaagaggtggtaggaggtgaggtcctggagccagcgatttttggctcccaagattataattatgactacatagagtttcacctttgcctccatgactcaccgtatttttgtaaccacattgatggcagtgaccaggtggatagtattgagaccactatggctattgaatgtcagcagtgtctctccccttgcaagtctgcaggctgctttttccttctctgcatcctaggaaaagcaatttattctgtccttgtggttttatggtaagaaataggcttctttctctatggtcccttcctgccttcccttctccgtagctgccaagtggagactgagatgactgtgccaaatgtacagatgtggtggtgcacattcgaactgctgttgccctggcagagacctcctctttcagcccttgcaaatccttgaagtctttcttgcctcactgtgcatagcttacataagcaaggtttaaatttgtcgagaatttaacaggttttcagatctgttgtctttctttaatattgtattggaaaatgaacagtataatgtactcatagctggcatgggtcaaaggtagtctgatctttaggaaaatttgattcttgaaatcacatttctgaattattaagaaattattaagaattatagcaagaaaaactgtttactgtgtatgggtaacaattcttctgagtccttcagtgtgtacttctgtagatccatttacagttgcaagccatagaattttttcttgttgctatatgaaatgaacaaaaatgacattaaaaattttgaagcatcttgtcatgaatagctctaactctgatcattgattattttaaaatccagcaatagtgttctatcatgtgaaataatgctttgttatctataaaacctcagagagtgattgagaggagggtggcataaagtgacagcttagcattttcttgttgtagggtcatgttatgattgaaccctacgttcagcctgattcagccctcatagatgtcagctttcttttctttttattttttaagagacagggtcttgctctgtcacccagactggaatgcagtggtgcaatcatatttcgctgtagcctccaactcctggactcaagtgacccttccacctcagcctacaaagtagctaggactacaggtgtgcaccactatggccagctaatttagaaaataatgtactggtgatgtcttgccgcgttgcacgggctggtcttgaactcctggcctcaagcagtcctcctgccttgtcctcccacagcattggggttacaggcgtgagccactgtgtctggcctcaacttctttctttagctgtagggaagggctcaatggtaactgaagagattggtgaagggggtgattgacataaaggttgacctactcagaaaatgataaaaccaaccaaattaaatgtgagagggaactttgcatataggagatgtcagactttccagatcttcttaagaggcaaattactggtcacatggcaagtttatcttctaacgttaaggaaaaaatacaaaaggcaacatctgaactgttgcataaggctaactatggtggtaatttgaggatccctccatgggatggatttttaagagtctgcagggcctgtgtttaattggaaaggtcataccacactaaggatctctcggtctagcccacttttacttctctctcaagccttattataagcacgagaaagtgtgcactaggatcgtgatttcaacacttgttgaagccactctaagcagccttgcatgatgaaagacatacagcagaatctttgtgaatctcccacacctccctggctgctgtttcttaaccccctttagcaagaggacagacaaagcatgtgcctcctcatccggttccgaataagaaggctttgaacagacatggtagttgcctgcaaacacttgaagggatgatacgtggacaaggaagtagattcatttttccaaagttccagcaggcacaaccagattcagtgggtgggatcatagggaggcaaatttcaactcaatatgagaaagaactttcagatgattcactgtccagtaatggtatggctgccttgaagtttcatgctccctctagctgaaaatatgtgatggatgagaggatcagccaccagacataacagaaggaattcctgcattgagtggaagctcagctgagctgattgctacaatctgtccccttcttggcattattaataaaataatttgaggagtgactttaggggagagggatatgtaaaaagaaaggaagtgagaaaggtgttcctgaactccttaaaagatgattgaacaattacttcacctttcccccccagctttttattatttttccagcttttgagcacactgcacttattaaacacctactatatgccacagcattatctcatttaacagcaaaaggcacagatcccagtgtgttccctcttagccagagttctgcaactgtttgctacctttcacacaagggttgagctctgtggtcatctttggtgacttctcacaggttgtgctgcatacccatcacagctgagctcaactccttgatagtcttttcatgtttctgtttcactttttctgtgtttctcttatggtgcttgcaatattaggttgtaatgatatgtttgtgttgatttttctcactagactgtaagctaattgagggcagaccccttgacttatttatcaggttaatgactattcaagtgtctagcagatagtaaatgctaatgtttattgactcaatatttgattgctcctctcatcacacccctccctcaaaagaaataccggtgataacttttatcctcaacgtttgaaactaaaaggaaaaataccggaatattctttcacttctggaccctaccttcccaatactaatcacatcctaattgcttaccccacccattctatttcagggatggagggaaagaattatgccaacaaatctccaaaattagagaagagaaaaccagctattatgcaactccttcatctccccaaatagatgtgttgcctttggcatcactagtggaaggttgaggaggaatcctcctgcttttaactagctgtgtgacctggaactagtcctgtgaccacctcatttattcattcatgatgattttaaggctcagtcagtcttaaattctgtaattcataacctcgtttcccttcaaaggttttctgaagtccttttgtccttttcgtttgcatggtattctcctgaataaccacgaagccagaatgatgctgataagggaagcagtgttgggcttagaagtctgtttgggaggtggcattgggataagactgtattctttgtgatctgacacctccagattgagtccctgctgtacggccttaggcaaattataaacatatttaaactgaagattcctgtattataaaatgggcacaatattatgtatctcataggactacaaagactcaatgagataatgtatattaagtgtttttcctgtgccagaaacatgataagcccttagaaacgatagctgctattatttggaaatagtcccctctctttttttattcctcttttctacaacacctgaaagagaccgacacccaagtcctgaagaagcttccttggcatgggtttgctcttgatcatcatttcttcttgttgtagacttagtagaggacagtcaaggttcttcctgctgaggcattctgctcctacatgtacaatggccaaaggagcagcccatttcacagtggttgagactatatttattttaacatttgcatggaagacacaaatgttactgaggagactctggaaatggatgtggggtcgtatatcttaatatcacataatgtatctcacccagatcaaaattcctttatctgaaaaggctttgactgagcaatggtgacatagcagctcctgagcctgacaataaatagacaccttataaaaatttatgaagttcaggttgtaaagaacaaactgcacataccgagtagtagcattcttattaaaataatttcatctttaagtgtgttgtctctgctttgcctataatagaagcttgcgctaggctagacacctcaacagcctataaacttttatatgggcttttggaaagggatgatcggtttacaagatatgattttcttatctcaccaaattagattattagagatactgtccctggatgtaaaatttcagtcctgagtaaacctgtacctctgagatactgtgcagcctgctagcagagtggaaatggagcataataaatttgccctgagcccatttctctccacatagctccataattcattctttgcttggtatccatgactgcttttttacagcgaatcagtctacatccaggctggctcctttcatgtgcagcacctcctccttgctccagaccttgcctcttgttatgctagactcctctcatgcttctttctagagctatgttccaccatggaccctctgtccaagctgtgcatgatcatatgccaagcagttactctagttataggcttctttgttgaagtagactcttaaaaagatactctgtttaaagtggattataacaaataacagcatatgtggaccacatacgtaggtgcaatgaatatttcacttattcttttctgagtctcctctgaggggtcagagaaggggtaatctgctactaataccacatgcttctttactctagtcccttccacagcatccatccatgcggccctgtgactcccatggcttctctccctctcctctggttcaacgttgctttggtccaatggcattgccactatctgctactacaaaaccaaaagtggctgcaaggaacttaggaaaagagaagggtttaggaaaactttctccaaggtggagtggagacagccatacaaaactgggaattaaatacatagtttctggtcctgtttctactcttaattattgtggtgagatcgggcagggaatttatctttagtggacctcacttttgacatgtgtgaaacaagtaggaataggtacattttaagagaaaattgtattaattatgaactatatagacatggaaaattgacctctctcttttcttttaattcaataattaggtgtcttgagaataagctggtagaatctggggctttggaagaagagttaccaaaataattgtgctatcctgcagggtatagtgtggggaccactcagaaataactttgtgtagaaagttatcagctatagcctggtcatagggcaggcacatagcacagcagttttatgaagaatataagaatagaatgtgtagcagacaagaagcagtggcacccaatttgtcagttttaggggaagagtatatttgtgttcttcagcgattttaaacactgttaactaagtagcttgttaaactttttaagaatgctttcacctgcatttatttattcacattctctttaactctttgaatttggtaagagcctttatttcttgcctaattttattgtggagaaaactgaagcactgacatgctataatgtgctcaaatggcacagctgtatggtggcagagcaggagtcatgtctcactgaggagcatggtctcctagctgctctaggtgagtccacggaccagcagcaccaggatcacttggaagcatgttagaaatgcagaatcttagcccctgcctgaaagctacagaatcaggatctctactttaaaccttcaggggttttgtttgcacattaaattctgagaaatacagtaatctagtggatactgttgtctccactaaagattcttctctgtttcttgctggggggccctctgggttcactgagaggccagcctgtagaggggaagcatgcctgaggtacccccaggacagctttctggacttggtatgtgaaataaaacaaaaagagttgtctttattttccacgcaggtaaatgggctatttagaaccacacaaatagataagcaggatacggaattcttgtctcattcagaggccttgtgagttagctcctgggcaaccccgtttctaacatcaccaccttgtgtcggcaaatttccatttgaaaatatgcaaatgtaacagaacaagccagcaacatatctgattaaacatctgagtgattagaacaatttaaattaaatcttgtacctgtgtttctaaaatgacttcagatgctgagactgttgaaacacattctattggttcatggttccaaattctgaaaatagcctttacagatgttttataagactatgggtctgaaatgtaaacataaaaataactgaatagcatcaaatttgggacctaaaaatgctgtaattactattttgatagtcagcaaaagtcatcagctcctccaaggcgatgactttccatagccaaccaaaagtatgtattcagtcattaccatgtgcaagtatgccagtgaagagaatgtagtctaagagagaatctctgaaacgtcccctttatctttcaaaagaacaggttggctttgaaaaagtcctgctagccacatgacatgacaacttttaatagtgtcccgataattaaatgggatggacaatagtgatccattttgttctaagatatccagaccaccttaaacatactttaaattctagggcatctaatatatcaagttgtaaatatgggataatggatgattttgttcttgcattccttaggaggtctctaggatctcccaaatagtgaaactcttgccagtttcctatcgtgaccatctgaaagggtcatgtgtacacatgttgctttgcatatacaagctcagaaaatggaacaagggctgcaaatctttgcaaatgagttttgaaaaatatgatgtatgtgatccatatatttcttttgtatgtgaggcaggtgtgacatgccctttggatgatgactttatccttgatccttgtccctgtcaattttggtggcacttgctctcagatttacaagtagaatgacatttttgtactggcagagtaccctgggttgaactgcctacgctaaccacagcccacctactgttgagatttttcatctttttagactggcattatattatgccacattgtatatcactggttctttaatttttttcttacctgtcttatatcccctcacccttcttcaatttattgtattgcacccagtcagctcatatgacccactaaagaattgaactgggaaaaggctgaatatttaagtaaacctgtaggaataatttgctgtcagcatatatatttatatggagaaaatattctatgatggacttcagtttattcttctgatcatcttaaggcatttctacgtgtagggctattagagtagtttctggattgagataatcaattgtattggagcatcagtcttgtatggtgtttgggtagtgatcattatgctcctgacatatggaaaaaaagaatatcccaggtatatggatactgtacatgtcaccaagacaaggttacaaagaaagacaatgggataaataagtcctggacatggttctttaagtttaatagtttatagatgttatcactcacgagagagttatgattttacccaacgctctttgtatttggaggaccctttcttattggattttcaagttctgagagtgatagagcttgatataagtagtgttgccttcttttttagggccacaattaaacatcctgtacatttttacttgcttggagagtcatattgattatttactctctctcccaacctttttgcagtatcagtgaatcaaaggtttaattttttttattcagataattcttttggctgaacaattatgatgttttcaccttggtttccttttcttccttgcttctttctttaattttaaatcttgctgaagtagaaataacaccagtggtagcaaccagagactatggggtgcttgactgtgtgtagtagtgttttaagcccagaacatgtattatatcatttaatagcaaggcagacattatcatagtccccattttgaaactgatgcttagaaagttgagaaatctttttaagtcataagactatagtgactgacaggatatgactgtgaaccaaggcctcattgactctagaacccacctttattgtgagaaccatactgcaagagcagaaaggaaatttaaaaatcatttagttcaaactattttttttacagatgaagaaataggtcaagagaagttaaattctttacccaaagttcatacaacaagcaaatggaggaggcggtttcaatcgatgtccgtttttaaggaggttacgcaggcattttctgttctatctaatagaccaacttggatcacgaatcatctctggaccgatctgctataaaaaggagtatgggctcattgtacagaattgttcaaaatggcttgctcgcttctttctgggggttaagaggaaggaattcttgtagctgggcagactctgcaaaagctgttcactgaatggggttgctgtctcccaaggctggaagcccagttctaggcagactcctgcaaagggaattttccatgttattagaattcctttttcccctcaaagtagataaaattcagggtgaaaccagcctgactttattgttctttactcagtccagtctccaggccctgcctgtatgttgaaggtagattgagtttgacagatggaaaaacagcagcagtcctgagactggctgccaaatgggacagaaaaggaggtgatctgatgggttgtagcattgaactggaagggcacatataccaatgcacaaatgaagacaatgaatggtgacccttctgaggaaatagcagcattttccatcactgatttaacagcattgaagatttggaaaagagagaggcagttactgtgtgaggtactgcttttggtatatacctatgtcacaagtatatggataatatataactcagttaatatttatcttgtgtagtaatgcttctatatagatgtgtgtcttgattggacttaaaaaatattctatttttctgttaacaaaatgaatctaaacttattcaaggaaggtacgaagaaagaagttccgattcactgagatatatatgcaggtggaagggtgattggctgtgatttttactctagatgtacacttcttttccctttccacataggtagctagttcccctgtgctccctttgcctcaggggagagttgtgttgcagaaaggaaagagaaattgtccatactagaagagaaatggctttggtgtgttagaggccccttgaggggattctatcctgggaggtaggaggagcagagacctttgggaaggtaaacaggaaggtatgaaagaatggaagagagagattgattttctaaggttaatggatacaatggtctgcatctttggagcaccctcaatgctgtggcagagttttggggtgggggcggtgacacctagggaagctgtatatccctagctttggcaaagaatcctacagcacctgaggcaggctccctccacaccaaagtctggagaggcctttagtccatcagtttccttttaagaatgcaaatccaagcatgtttcccagtaaaagaccactccgatggcttcttatctgcaggaaattgacaagaatattttaagcagatgaaatagcatgtgcaaaactatgaggctaacggcacatggactctaccagtgactcttcatctggatcacaggggctttgctgaacagctggagggaggggtaagggctgctcatggtggcctcgactgccatctggtggggtctctgtgggccagtgacattttgtaggaacatatgaatttttcaaataaaatcttacaaggaaactcaatctatgaaagagttaatcatggagaagcacaccagagtttcatgccatgccctccccatacaaccctgagttcttgagcatctctgtgggaccatagctgtggataatggaaaactcatatgtgatcagatttaagattttattagatgagcacaatggtggtatgaagatacattaagggacaaagacagggaagtttagactgcatgcaaagagaccagtgaatgaggagaaatttctgaacacaaactggttttgtaaaaataactttatttttagtttcagtttcatagaatagtgtgaacctatttgatctgatggcagaagtttagttatattaataattcagggtcacattctccttctctgacttggaactaatcccaggggtgtttatatacatagtaaaaaccaccacttactcaaaatttaattaaataaagagcaagtacttcacaaaatttaactcatttaattatcattgtaaccctgtgtggtatgtactgtcattatctccatctcacagatatgaggaaactgaggtccagaaagttgagtgattcctgggatttaaaggtaggcagcctggcttccagtatgctctggtatctgtgttcttaagtaatttagctgcaatgtggaagtatttgtggggagtgtgtcattttgttcttgagagtgatcagtcctctcaggcgtccattgccattggggtgttttgcttttaatctcatctggttctaggacatcatccaagtatgttgccctggatcttctcaaatgattctttctactactcatgacctgtgctaggataggaagaaattctctctaggattttacctaaaccagtggctctcaatggagattttgcccccaggagacatttggtaatgtctagaaacatgtttagtagttacaactggggatggggagtatgttacaagcatctggagggcagaggccagggaagctgttaaatattctacaacccacatgaggatcccacagcaaaaaattatccagaccaaaatatcaatagtgctgagattgagaattcctaatacagacacaaattacatttcagcaattttatttgtaaagtcttgctttcttcccagagctctgtcttgctgggtaggcacaggttccttttgttcttagatcccaccaaaccatcctggggtttctgattccttttcctccatcagggctcagtgcagggctggtgagtgggttgggacctgggccctcttaatctcttgtatcaaaactctccacttaatgtcaaccattttccccctttcttccttttatctagtctgaatatagaaagctttgctcctactgatcttagtctttcaaatatatggcccatgaattattgttcccttaacttttgaaatccaaactgtaagaattgattacctttttctctgccttgtacgatgtgatccctttcctgggggcaatacatgcagaaagtcagcagactgaaagaagttttgcagaaatgcagagaaaaacctttatttgtccatgtcagcattttacaatctgtattctgaggaccactggagatgttaataggctttctatgaaaagagggaacttctctctaggaattcccaagtcatgtaagcattctttaaagctcagaaaagcaacctatttaaatttgtttatcccagggcttcacaaagtgtttgacaagaaaacttttctttttttcatggaatccctaagaacattttgtgcatagttgagaaatgttagtctatgtgataaatgtggcctttatcaatgcattggcagagagaagagtacaggttctcgagatattaaaagttagactcactagtacttgatgaatgattggttatgggaggtaaggaagcaagagaaatcaatggaaaaataaatacagaaacttcaaagttgaaggaacaaattttgtatcattccttatatatcacaaaatattaggcaccagggatttttaaaagtgtaaaccaccaaatgctggtactgaatttatctctctcctggattatggtaatggctttctaaatggtctcctagctttcattcacttccttttctaatttcagctccacaaggtcaacaaaaaaatctttccaaacaaagacataatcatgacgttgctcttatcattgaactttgatggttcaattttgcacagacaatccaagctcctttgcatagtattcagaggtccctgtcaatgtcttcttgaatatggatatatagaacttagggtggcaagaaatgaggggctcttactcagcaaggcctcactgtgtactgccagtgcttatgtgcctttaagggactttgggggacaaggcaggctgtgccgggggatcacacatctgttcctgtcctgtgtgaatgccttgattccatatgcattataaatatatctgtaatgtgacctaatcatagaatgaagatgtgtgtggtccatctctgcctatgcaggtatcttccatttgcccttccagatcgaccctcacccttgtctaccctgtgctctgggaagctgacctctttgtattcctctgcccactgtcttaacacttaaaatgggtttggctaatgagaaatgttggcgggagatgggagggagggaagagattgagatcagggtgtttattccccagatccctccctggaagggcaccacatcatggctgtgtcttgtgatggcctctgtttctctcaaggtggcctctcccaccatattttctcttctccaggtttgagtaactaccatctcctcttctccccttgggcgtaggggtggtaaaacaccccttctttagtccttggttcctgcagtatccttgtggctcctctacactctgactgtgtgcttgtaaatagttctttaaataaaccctcttcagactgctccaacttgaatgttgtatttccttcccactgggaccctaacttatataggtggccgtctgaaacactgagatttttgagtgtctgtgaatggtaaagatttaaatgatgaagaactagaataaacagatacattatgaaatgtccattttaatgttttacctcatatttcaaatatcataaaattatggcatggaatattaagtttaaaaataactttgaataaggatagtatgccttttctggcccagaaaggtcatttcttttgtgatccattgactaataaaaattaatggaagagagctccaagttggtgtgagtggtggggaagactccaactgctcacagttctctctggtaaggtcctcgagattaggtatgttgggaggttaattggagtgcaaagacccaggaatcatgtaatggctcactggctacagcttttgtagctggtttttaatgaatgccaaatacgctttcaaggataggtgagagaggctgtcagctgactacagctaagcagttctcttctggatccaggtgtgaatcttctttagaagaattctccagaaagaattcagattgaaggctgattctagatatttttcctccttcagactgtttataggattctttgtttttctgagttaagacagaatatatagtgccggggctaaaaggaccacacttttgcaaggagcagcaaaatgcccccccccctttttttttggtttacagtaataactcatatttagctctagtttaattattattggttcatattttaagcaaaacttgtattttgaaggtagttttatataatttcacctttcatgattctagtcatgaaaaaattacaaattgctgattatttttcagagaagagtgaatagtgcttgaatatgacagactggagatatcatgaagcttccagtattcttgttagctattttttgcttatagatctagccatatagatatttatatatctatctatatatagctttacatcccagagaagcatgtgctttcctttcccgaggaatcttgttttggaaatggcaacatagcaagcatttcctttggagttgcagaggggaaggagctgtatgtattgtaacaatgatactgggatgatgtggagcaaagaatagtaaccaaaaggatagtaaccacaccttccatgtgattagaagttaggcgctccatgtgtatgaagattgtggtgtgaggggtaaaaagataaatctattgtataagcagcatttgctgtgcaggctttcttgttttgtacaaactgaagtactagcgttgtaatcagtggttcatgcttgggacatgtgattagggaagatccaagtaatcttttgaatatgtttttctcagactgtggtttcttttagtctcccatagttatttgatcatggagagaaatgtttatcattttatttgaaaaaaaggatttaaaaacaagcacagcattggaaccttgatctgtataacacaagaattcttattttattcacctctgtattccagagtgaaagacttttttttctacactgggccttgaataagaaatatcagagatttatgtttttaaagaattaataaattgtaggtatattgtgcacttaaaattttagtttcttttagctgtgattctgaagtagtattaaagttaaaagataaaatttcaattataatgcaacaactctgaaaatgcagcttatttttttggttattaaattatagtgatgatagaacgttattacctttcttcttttaaataaccttagtgtttatatctaactctactgttctctatgtgttagattacacgccttattttataactataaagagctttaaaaggaaaataggcttgatatttattgttgtgtctaagtaagataatgagtgttttcttttaaaaccatgcaagcactttgttgtgaggagggcaaatataaaatgcgtaaactcgaataccctcaaaataccttttagatgaagcagtatatttggaggagggaaaaccacggtgagtcagctgtctcttcaggctttgctttcaaaacagttgctgacttgtttagtgaccttggccatgttggtcttattccattttagttttccttttgacaagtgaatttctttctactaacctgcttttcctgaatgtgctttagaaaagagatgctatataaatactaactaacaataatactttctatgtcaggagtgaatttcaatctgaaatgagaacacaatttgttgatatttcttttgaccttgtaatccttaccaaaaatataaaagaaataaaatccaagcacatcgtaatgaagtatgctagggtaaatgattgatagttcattatcatagaaatattatattccacatagtttactttaaatattggcagcttgaaatttggcttagcaaattggcagcttgaaaatccctgctttattagttagcaaatgattctgagttttatcacattttattgtcaatctcagtttttaggtgcctaggaattaaaaattatatgctcagctgaccctttaattagctctcattctgtcttacgtgatttatagcctggtggcttacatgtaaaaatgatgtatgatttaatgagctggaaaggcagaatagtttcccacctctgatcgtttaatgcttttctctggctggtgactggggtgctgggggcaagtgaagcagcaattggattccctcatttatttattgttacaaggacaggaaggcccagtttgctgtgattgtttgcaagtatacttttgtttcattagaaaacacaaggccgtgcgcggtggctcacgcctgtaatcccagcactttgggaggccgaggcgggtggatcatgaggtcaggagatcgagaccatcctggctaacaaggtgaaaccccgtctctactaaaaatacaaaaaattagccgggcacggtggcgggcgcctgtagtcccagctactcgggaggctgaggcaggagaatggcgtgaacccgggaagcggagcttgcagtgagccgagattgcgccactgcagtccgcagtctggcctgggcgacagagcgagactccgtctcaaaaaaaaaaaaaaaagaaaacgcaagaaccttgattcagatatcttgaaatagttttttacaagaaatatgagagaggcttctgactcaaattctcttattttacatttttattttattgctctaaatgcaaatattccagtagaagcaatacagagtttaacctgcagggtttggcagtgttttaacactgtgggtctatgaagtccacaggtgtttatgaaatacattaaactgaggattgggcttacagcagtggataagagaggcaagatcccttcatcagaggacagacaacaaatgataagtaaatgcataaacatgataatttctcactgtgtaatgtggtgagtattatggaaaacaactttatgaaattatttcagaaacctcacgtaagtggaatcatgcaatatttttgtcttttggtgactgacttatttaacctagcttgatatcctcaaggttcatccatgttgttgcctatttcagaatttccttatattttttaaggctaaatagaattccattgtatgtatgtatcacattttatttatccgttcacttataggcaatagtatgtattatacacttaacgatttgtgaagagggtgtatctcatgtggagtgttcttactacaaaataataatcataataacaactttaaacaaggtgctctgagacatgtgccagaagtgaggggctagagtagaattggtgtcagagaaagcctgccaagagagtgacaccccagccaggacccacatgatatgaagggtctagaggcagaacttcccaagcacagggcacagagaacaccagttccaggaaagaacaagcttaacaataatgacaaacagaagaaggaagtggggatggggactaatgcataagggtgagaagaggtaggaattgagaactgacaggggcagatagtgcagtggttggtatggccatagtgaggaatgttagcaagcgtcgtattccttagacctttgccatagttttcctggcccccccaccaccagcacatcgaaggtgctatggtgcacgtatttagcttatgtgtattccattaggtctaggccctacctgaataatatgggctagaaagttctaaggccagaacatataaaaagtgtcctattacctcaagggtttccaccttccccctgcccaacattttactttgaaaagttacaaatagatggaaaagttgcgtaaacccttcactaggttcaacaattggaaacagtttgccacttttgctttatctcttttctttctgtatacacatttggttttgtttttgctaaagcgtttcaaagctagttgtagacatcatgacatttcacccttaaatacttcagtgtgtatccggtcatgtccaggaaatttaacaatacaatacttctatctactatccagcctatgcttacattttccagatagtcccaattttgtcctttatagctcatttttctgttgtcctatttctttagtctcctctaattcagagtagtcccccagccttctttgttccttatgatattgacatttttgaagagacaagccaactgctctgcagagtatctctcaattttgacgtgtctgaagtttcctcctgagtagattttggctaaatgtattaggcatccttcatgggcgttgttgtgtccttcatagtatataataccaggaggcttatgatgttagtttgttgatgatattaaacttgattatttggtaaaggtgtatttgccagatttccccattgtaaagatatctttttctcttttgcaatcaataactaagattctgaatatcttgttttctaatagcctttcacctaatgaggttagcatccacaggtgcatctttccagaatcagttgttactatggtggttgtaaaaatgatgactctccatttctcttgttccctgtacactcattatttgacttccctttgtgaagaaaaactttccccccgtctttcgttttaaaatatcagtatggactcagtaatttttaaaaaagtcattatttatcattcactcctatcataatacattctgatgttgtaattgtcccaaatttgactagtaagagccccttcaggctgatatttttaattagttattgagcactctccccaagccactttttttggtctagcttagaaggaggttcaggctcactttgtactttccctgctcaagaccagtaatcactgatttctccaaaaggttctggcttcttctaatggggagtggtatttagaaaccaaaatctgggaactagctatgtttattactatggggatgttattgcttccaggatgggggtatcattgcttttagtactattcagtgcacacacatacatatataagattatgagtacttactgacacctctaattctaatcccataccacagcattctttttctccttccctcattctgtagctgtatctcctcccacagagaaaaccatgattccaataacatgaatgtattaatatttacttgtttgtggctacaataacccactccctaattttagaattgctacaccaatatcaataccaacaacaaactcactgagttcaagatctctgcagttctttttgcccttagaatgtatttcattgatgatataaagtcatacgctatgtccacaagttacctgcattctttttctattttcttctgtacagttatgttatttattggatatataattaggttcatttttttctgagtgaattcaattttagtttctcccatcctttcttatttaaatttaactttttaatatgtaaaacattaacctgattcaaaagtcaaaaatgtataaaaaggcatattcagtactaccaggtgttttaaaaaaattagtcatttttagctttaaaatgtaataaggcaactgtgtatagtaaccaccagtgaataggacagctttatcaaacggcataaggggtatcagtacatttgtagaactctaaagggccatccaaataataattcttcttggtttgattctgcattattactttcttctttaattgtaaatcttttaaatttatatctgagagttgtatactaatttttagcagaatactgtgtatacgtttttattgtttttttaggtatacatcatctatagagcagtgtttttctagctaccacatcttatttgtgagatctgaaatagtttcaaagaaaacttaaaagaacattttatttgtgtggtttttctgtgtattctcctgaaatagtcaaaatatgggcacatttggggaaacaaaaactgaaaattgaaaaatctggtcaaatattcaattgtgcctaaataaaattataaccaagtatctgattgaatatatatacacctatacatacatacatttatacatatatatacacacatatacatgtacatacacacactttttctctggatactttgtctctgtataataaggactatattaaaaagtgatatactctgagaaatgtgaaataatgggttgtgcagattttaaagaagctataaattaaccttgaaaaatattttatataacattgttattttcaccccaaagcagaggaatttcgaatgaataaaacatttcttgttgaaggtaatgtcagcaaaatcacttcaattcagcatggttcatttactcatgcaacaaaaattaattgcataatgtgtattcggttaggtcttgactattttctctaagcatatcttattttaattctaggatgctttgatttagtgtggaatgtgatgattattataaaatgtatacttggccatttaagttggttatttaaatcattagcctgaagatcatgcataccctggaatctcacagggtggctagaatgtggatttgtaagcttttgaaaatgaggtggtgggttgcttgacatctggatttgctttctgacttggtagactaaggcaagatgcctagaatagtgccctttcctttcctaaaacctaataattatttttgaaagttccacaaaacttgcttttatctaaattccacttttgaaaggtttatatacattaactttttttacatgcaaatactgaccctggaagtgttaagctcctttcagtcatttatactgtagtctgatgcattttaatctgattgctttccttctaaatcctagaagagctgtagtgagactgcattttaaaaggagaagtgaatctgttgtagcacgtagggaacttcaaggaatatcctggaatggatgcctagtgtcctggggaaccaaggtgggaggagggggagagggcgtggtaggagaaggaagattcctttgtaaatatagcaaaaggccagacttgtccaactctcatcttcctaatcctgacacagtttaattaatctgactgctgtgcttgctactgagacttgtcgatggaaggaggctctgccacatatcctcagacccacagctggatgttatatgcgggcagtcttgcctaaattgaaatgaaactccacaccctatcataatttgttcatgccttatgcctgaactatttctttctgtcacaagaattaataatcttcaagcttccaaatgcatgaatcagaaaaatagcagggagtcagagattttctctatcagtctctttatgagtccataaattgagatctcaagagacagatgtgcttggcacaggagtggcagagcttggactacaataatggcctccccactcctgatccagggcttggaccctttgcccaaatacccagtacttgctactgctgaactgactttcctttcttctcttggaaggagcatttaagcaaagttatgggcccatgagagcactggtatctgcttgcaaggaggtttacttctggaaaattagagattatattttcatttgatgcacgtatttccaagtgtatgtatttctaaagatagattttttaaaaacaaaaaatcttaatttagatgataagcgatttttacctttttttttttttcaaagcaacttgatcctgtaagttttggcatcttaagtggaaatgttcatgcagttttgctggatcttcgctatggcagtaaaatgcaatacagcactgtggttaagagtgcagaacggagtcagtcagcctgctaactatttactagctatgtgaattggagaaagctcctgtttccttagaaaacaaggatacctacctcataaggttatgtgagaattaaattagtgtataaaatttgcagcacagtacctggcactttgtaaatgcatagtaactattatctatcatcattattatcataattattactactgatactgcctggaaaaggaagtccatacaatccaggcatttttagttcaagattcatgtgcaacttctctgtttcccatttcatgagtattacaaatatttttacatatctttaactgcctgaaaataaaaaataaaagtaatagactttatttttaagagaaattttagatttacagaaaagttgagcagaaagtatagagagttcttctgtactccctcttttcccctcagtttcccttattgttagcaacttgcattggtatgatccatttgttatagttgttgacacaatgttgatgcattattattaactaaaggcccttgtttgcattaatgttcactctttgtgttgtacagtctatggattttgcgagatacatattgtcatgtgtataccattacaatatcctacagaagagtttcactgccccaaaattcccatgttccacctattcatctctgcctccccatccaccggaaaccactgatcttttattgtctctctagttttgccttttccagaatgtaatatagtttgaatcatagagtgcatagccttctcagatgggtgtttttacttagtaatatgcatttaaagtcccactaagtcttttgtggcttgacagctcatttctttttattgctgaataatattacattggatttacatgttatctgttcaccttttgaaggacatctaggttgctttcaagtttgggcaattctgaataaaacctccataatcattttttatgcagggttttgtgtggacataaattatcaactcatttaagtaaatatccaggagtgcaattgatggatcccatggtaagacaatgcttggctttgtaagaaactgccaactatttttcaaagtgcctgaaccattttgcatctccacagcaatgaatgagagtatctgtttctccacatccttaccagcatacagtatggtcagttttttagccatcctaacagaattttattcatagctattctaatagatatgtagtggtatctctttgttgttttaatttgcatctccccagtgacatgatacggagtctttcaatatgcctatcatctgcatatcttctttggcgaggtgcctatgcagatcattttgctctttttcagttgggctcttttgttgagtgttgaagagttttttatattttggatacaagttctttatcacatatatgttttgctgatattttcttccaatctctggtttgtcttttcattctcttaaaaatatcttctcagagccaaagttttaaatttcagttaagtttcttctatcattatttttctttcatggattgtgcttttggtgttgcatctaaaaagtcatatccaggccgggcgcggtgggtcacgcctgtaatcccagcactttgggaggccaaggcgggcagatcacgaggtcaggagatcgagaccatcgtggctaacacggtgaaaccccgtctctactaaaaatacaaaaaattggccgggcatggtggcgggcgcctgtagtcccagctacttgggaggctgaggcaggagagtggcctgaacccaggaggcggagcttgcagtgagccgagatagcaccactgcactccagcctgggcgacagagcaagaccctgtctcaaaaaaaagaaaaaaaaagtcatatccaaacccaaggttacctagattttcccccatgttatcttctagaagttttatagttttgtgatttacatttacttctatgatcaattttgagttaatttttgttaaaggtgtaaggtcaatgtctagattattattaatatttttctatatgtatgtacagttgtttaattttcactctggtaagtgaatttacattattcttggatatatttataggaagatattttaatcactgaagacctaggagaatattgtttttcagctaatagtctcttcactatgaagagaaatattattagaacataaaattgttttctcagtgaggtattttgacatttggtcttttactgtattttgggacgttttggaaagactagaatggtgtgtatgatttggagctggttgtattccttaattaaaatgtttggtactgctcttgtttaaatagttgtgctctcttaaaactttttttttttttaatccatcccatcctttgagttactggtttggaagattgttaaaatgaacctggcttcctttcttttctttttctcttcttctttctttctcattctctttctttctttttaaatcactgtacttggctaacaaaccttaacatctgctgacattgttgatcctaggaataaaaacgtgagatgatctctggaaatatttctaggcacagggcccaggcaatccataaaacccatatatttcaaatcatgccagttttgtgaaatattttcagaaatacagttgtcagtgatttggttacataggcctgtttaaagaaaagattttaaagttcttgaagtgattcgtaattttcatactctcaaacttcatgaaaaccaggagccttttcttatccaaatcttccctttttgattgtcttggtattcttttttccaataatgtagccactcacattatgatggtttgcttagtattaaaccaaatcatctgaaacaaaaagtgaataaaggatttatttcttttaaaaaaatttacttaagctacaaagcagaaatgaggtcatgtttttacttttaataaggagttttcaaatacaggccattattgctaaatgttgtgtgtaatatggtgggctcatggtgaaggaattaatgggcaatttaatgattagcatttggattttgtttagctgtcctttgtaggatgtatttttacctcttatcctattatatagtttcccacatatcattatctcacacttgccctctgtctaaaagtattgacattacaaaaaataaataaggtagacccagcaattccataggcatatgtacctatgttccaccaaacacaagaatgttcatagcagcatcatttataacaccctcaactgaaaaatactcaaatatcaattgatagtagactagataaataaatgatatatttataaaatattcataaaatgatatattcataaaaacacaatactttacataaatgaaaacaaataatttacagttatacccagcaacacagacaaaactcacaaaagaataaattctacataactgcatttataggaagtttaaaaacaggcaaatataacccatggtatcaaaagtcaggatagtggttacccttgaggcaggtaatgattataagggggcatgagaaggcatctggggttttggtaatcttgtcgatcttgatgctagctacatgggacacgttcacgtcgtgacaattcataggttctatgatgtttgcttgtatgcatgtatgttatgttttaacagcatgctagaagaaaggcaatgtttacatcaactttggctccagtgaaggcagcatttaatagggagcagttaatgataggaacctaggaaatgcggggcagttctggttgtaagagatatgtgaggtttattttttaaagattatttaacattatttaaattatttacattttgcatttgagaattatatttttcaaataaataattatttatatttacataaatataaaacacagatttcccactgatagaaatacataatcatttcattaaaatggtatttgtgttgttatgaaatcaactatcagatatttgaattaatagaagagagatccttgcttaaaagtcttttgtgacttattgcttacgggacagaattctgatttcctgggaaagaatagaaggcccaaggtgatctggattctccccaagtctatttaccccttcttccccaaccctccctatcacactgtctccaaaatacccagcttcttgcagctcctcggacattggtttttccacacgaactagtctttgctctagctgctccttctcccctgcatgcctatcatatttacatatttctgactaatgtatttctagtgcttaataaagtatctggtacttgatgggatgtcagttaattgaagacagcttgaagactctatcagtctcttatagtgtactgtatcatcttaaattcttagataattttgtgcctctttgttaggtttaagactcagtgtagggtgagtttccagtttgtctttattctactgtagtatttagaccatgctaggaacttaagtgtggaatggacaaaagatttgaagttttgaattgatacagacaccaaagtcaactggatttgtctttgatgtatgccttataaatttttagcttcaaatttacctttcttattgcattatttatagatgcaaaagcagttggtatttatttttagtatatgttttgtggggaggtgctaggcagtgagagaaatccaggcaagttaaagaattttttttctgaataatttacaaagcaaattaaaaaaaagaatgaaacaaaacctacctgttcattttaggtccatttagatctattgtgtgcattgtggagaaatatcttgctgctgaccccctgctttaagggagagtgctgcatagtttaaaggtgcctattgggagtattttcgcttctctgcagggctatcaatagccctctttgcttcacagagatggatggggctggggtaagtggtgtctgagtattctaaaaggaatgaaatcagtcatcaagtgagagttagaatggtgtcttttcattgttaacaagccagccttctacctctatccctgaagaaaacccgtgagggcatcaaagctcttgcatgctttgttgttgttttatttgtggctttatagagttgtatcaagaaacagagcactatcagtctttgttaaaatactcctccccttcccgatacctttcgaaaagtttcttccttgtctatttaaacattgaactccattcttgtttgacaattccaaaccctaaactctgttgtacgtgagggtggtagctgaattttcgacagctgtttttcataatttggtaacttatttacctattctcttctaattttaggctctcatttgctggtcaggtggctcacagaggtgatgtaaaaaggaggacaaaagaggtgttaaaaaggagaatacccaaaatttagtgtcaataaagctgccgagctgaggaaggggatggcatcagaatactgacaatgattcctagaatcatgggaggacagagatgggggggcaatcctgaagtggtaaacgggaagaaagttggggttcgcagatggtggaagccatgagttaaggaagggaggagttgttgtcatcagtggtattttactccctcatttccttgaaaatggcgtcctatttcagagactcacagtgaagcaagacttgacaacactgtaatgaaactccaagaggcagaaaggtccattctcagatggcttggtgagtcatcttgtggggacttctgctttaaaacatcattactccttaactgataaagcctaggcacagctaactaatctgagcttcaagataaccttacaagtaatttgggaaagaggaaatgagatgcttttaaatcttgcctttaaactgttagaatactggggggtggttattttgttaatctttattctttagaaggagaagaattgtgtttctgtagtaacacattttagactatcaaaaaagaagtgctttgaccactgctcaaaaccaccaagtattttttacactaactttagattgagtgaatttaaaatttattttgatatctgtcactcaaaaattgaaaaacaaaacaaaacaggaaatggtgaatagatagccattgggaactagactggctttgcttttgtaaatgggggattaggattcatctgtcctataaaggacacacagcatttagattagacataatctgattgtattgtaatacaaaggccattcaagtcagttcagtgttcagggtctgtaaacaccatatgaccactgattggtccaggggagagtattaacagaaagataataatgagttttaatccaaatccctaaagcacaacagctgtggcttcaaatgaattttctttcgtatgttagaagcagtgctgtgtttcttacaacatgataaattgaactatttctttgctcacacaaagagtatgcctatttaacttcacttttatttgattaggtacttcccttgtctcagatttctttaggatatacatgttgccaaaatgttttttttttttaaatcagactacccacataagagcaaagcataaaccaggcatctcctcagcaaactagcttatatggccaccctgtttaaaagttgtatctttaaatattaaaaaaattctccaataaaatgatgaagtcacacttaagatattagggaaccatatgcccttccatatgtgttcaaaatatatggtgctttggaaatgaaaaaaacaaaaacaaaattaaacaaaacaaacacagacctatgttcacaatgagtatttaaaatgccaagtttatttaaatattattcataaattttattttcttcttgtcattttgaaatgtattgcattaggaagcatttattctctgtatttttatgttttactaatgtcattattcatattgcacctactgtgtagtgaatgctatgctgttctgtgtaggatattataaaacataaaaagtgcagaagagtcacaatctgataaatgtcaaagatttacttttgtagttaacatttgttgtctgactcccaagcaccctttctctttctaaagtacagtgccccaaattttctgagcaatttgggtaacatagacttctcttctagctccaaaagggctctcattggtttaagcatcagtgtgccccatccctttagccacagtgatatctttttagtgatggtcacatggaccagacatgcacaactggagtagatactagcatttcaatagagctgctgtaaaaacaggctctgactttcctgctggaagtagttgaacttgtacccttaggaggtaggggagaccatctaaagatttttaaaaagccttaggtgaatacagcatctaagatcttcatactaaggtatgaagatagtcttggtgacactgttcagctggatcaagccaaaccctgtcactggaattttccattacaccaactagtaaatacctgtaattgctcaagccttttaaatttgagtttcagttacttgcaaccaaaaacaattctaactgaaacaagacttaaaaataactgcaaaccattgtgtttgcaaatatttggaaaccatcatttttgagaagaatgacatgctatttcaatgattgacagaggaagatcttagagttggatgttgggtcatggaggtagagaagaatgaacagtaaaatataagaaaagttgtctaagaatgcctctgtcaaaattattcttggcagacaaatgcatatttataggaaaattcatcatcctacaggattttattatttaaaaatataatttgaaaatgagtgaaacattaaattctagacaattgggaggaaaaaaaatcctgaaacaaagtaataccaataaacagaacttaggtagattagtattctgtactaagagaaaaaatgggaacaaataaaaatttgtgttaaggaaaatgttacttgatagtgaaccaaattttgacaaaaggcaaaggaggatttataaatgagctcagctttgtggccttggatagcctggaaaagaaaagtaggtataaaattaaacttgctatgttgagacacagcaaacattttcatctttttatctagaactaaaattcacctgtttgtgaaacttgtgctgcagctttgtaatacagcatagcagttctatgtggtattttatggtaactgaagaatttgatatggggggataagacccaggcagaagagtaggtctcactttttatcacctcaactgctttatctcactcatggaatcaaggttagtgaattggaatattttttcggctagaactttctgaccagtgcaaagttatctttgattcagcgtgaattttgagctcttgaacacttactgtttttctcccctccgaaaagaagagaacccatctttagatgaaaatttccaaacaaagcctgaaatctgctttgtatccctcacaacggtcagagttatataataactaatagaactttgacatctttatagctgtttttacagaaaatttctacaaaaagtccaggactggtatgccttatatgtaatggatggcttactcccataagcacagaattcctattattatgtgtttatttttgtgtgcaaagaataattctttagaatggaaaaaggtattccaatgacgtcattttttaaggcttaatgatctgggctctttggcctttcacttaagggggagatgtgtaggtttgctacctctatacccaaatggtaaacacatgccagcctcagttacaaattaaaattcaaaagtctagggagggtctttaggttcatgatgtggagatgacattcacagtgcaaatgtcctccacagcttaggagtggcactttcggtgagtgcaggactccatcagactctgttgaccaccaaggtctatgttgctgctgttgctgctgataattaagaatatgttgaatcagatataatattataattttcatcattattaccatcattaaatggtagtatttatttttgaatgttaaagtactttagcaaaataaatgttttacacgttagtgtattgccttttataacagctagttttgggtgaagtgatgtattaagctctgctaatttaagaaactaaacagtgaaatgacctcccacttggaaaatgtgtggttaataagttgacaggcaatctacctctaagggaaggctaagaaaaagaaggacaaaagcctgtgctcaatggactcctatttaacttattgccttaataaaatttgtattttaggaacctattgtgtaggaaatttttttcatggagaaacaagaatattttaaataagagttctgttggcttctttgaaggtgatcattttcttcaaaaagaggaacataatgtgtttcttgcttttacttttttacagaaaaccttgcactatgcagcagaacatagtgaattttaagcatatgctattgctaatgaattatctcagctttgtctctttggacactatagaagtactcttttttcttgcatcctatttttgtcactgcagtcagattaatgaattatgaactgtaccatttcattaggataatcagaattaagagatgatgttttccttggggacttctgcttggatatatcattaatcatattctgcaatctatagtcaaggcagaactgagaatgctagtttatctgacatatactaagaggggaaacaggtgtcatttagtctatcttgggtaaagcacgtcttggtaaaatggctagataaggaatgacatcttaaaattgcttcttatttagatctctgtcataggcctgaagaatctcctgggaaactgtgaagtgtccttaccaaaagtaaaagtcattactcgagagtattgtttttagttttatttatggcttttaaaccaaggggtgtggtataaaatgtaaaagaacggaactctcatttggaggctttatttattttctctgcagctcctacgttgttctcaacctcctgaactccccactgcatcctttgttggagggaatccaactgtctgagaggacatttttaatgggtaatatgagcatttctgatattaaatggctttaaagaaattcactcacaaagatcttttcaactgcccccaaatgactccatttatgatgactacttaagaagtggtatagatagttggaaagagaggagggcatggcaacaggagagagaattccctgtgccctgacagttgggagtttgtgtccactggtcagctgcaggaagatttgagggctacctgtaaagattggcaatttttctttaatatgtactttgagtaggaaaaagaaaaaagtattcattgaaaacttttgccaaaagttccattcaaattttattagttttgataggttgctctgaagtgcacaaataggaaattttagcattatttctagaataggaatatgaaaaataaatgtggcatagtaagtgtagacttaccaatagctaataatgtcattaaggttttaatgtcttagctagaacttccatttacaaaactcctttttctgacttagaatatttacaagaaaaagcaaacatccaccatttatcttctcttgtaaaacccttgaaattcattactataaggaaattccttatagtaagtgaggaaataaaaaatacaattatagccttttaagaaaataatcaaagaagtaagtttcatgtcaaaattattcttggcagacaaatgcatatttatagaaaaattcatcaccctatgagatttcattatttaaaaatataatttgaaaatgagtgaaacattaaattctagacaattgggaggaaaaaaaatcctgaaacaaagtaataccaataaacagaacttaggcagataagagtatgttaagagtaaagatagaacacagaatttaatgttagaagatggaaaaacaatagaactgactaagcctggtttaaaatcaaacaatgatatgaacatttggtaaactaaattttaaaaagagaaggagaaagagaaaatacaaatcaacaaatttagaaatgagaaaagggctatagtcagagtcaaagaagattacaaattatgcaaatacctttatgcaaatatacttaaaaattaagtaatgaaatctacgtgttattccacattaacaaaaccaaaggtacatagtaaactggaaaagagatttttaagtaggtattatagaaaattatcaaacttttattttaaaaaattcttaccacttaagaaaacacatcaatgaaaaaaatttgagtagtatataaataaatatatgtatatacacacacacatatacacacacatattctcatgtacatacataaacattctaagggtgtttgaaaagtctggaaacataagataaacttatttttgacagtgtgctaatgacatttttttaaaatgtgctatgatttcgatctatctccagacatcttgttaggggaagtacctcgtgcaatatgtctaattgttaatatgaaaaaagtataatacaatcgtatactacagtgtgtccagaaagtctgtaaaccaaggcaaaaatagtgtaataatagaatttgacaacatggctgctgtggactaaaatgtaccttttccccatcctcccagaaaggagaggccaaaagacctttgacctgtccttgaggtttggacaccatcatctcaatagtgactatgacagactgaaagccataagcccatcctcaactttcggagggcctgagcacctcacagtgttctgcccatctttccaaggggaaaagtaaagattgtctgtatttatcttctgggacagcattgaattaggttggccaagaaggaatgaagtttcaaggcttggaaggggtggaaaggtctcacccagagttttggattatgaagcacagtggcaggtccactctgaatcctgtggggcatcccaggaagtgctagggtctgtgggtgatagatggatgatgtggtagagggggaggtgatgtcatgagggaggccactgtgttccaggcacttaaagattccaaggtctgcactggctcggaagtggagccacccacctgtccttggggtttgaaaaccaacatctcaatggtgaccacaacatattgaaagccataagtcccttctcaagtttgctgaatttcctggtgctctcacagggccagagcaggaaagggtatggaataccaaataacactgttagcaaatggatactcggagtcatactttatttgatttagaaaaataaagcaaggtgacattaagttctattttgtggagtaaattgtgtgtgtgtgtgtgtgtgtgtgtgtgtgtgtgtgtgtgtatttataaacatgcacatatttatacatatatatctatgaggtattggcaaaaaaacaccaaaataatagccgaattccaaaaagaaagcctaccttagttactttctacccagtgaagaggccattggaactggcactctggggaagagcagctcccctggactagtttgatgtttttccaggtttatcttgggttttataaaatctgatgagcattagggccagcactgaggatgagaacctttctattcttctttccattgagtagacagacggtgagtcacttgtgtgatgtgtttcctcctagtcagctctggatagtgaggccgaacgaactgaccggaagtgtgttgtgggaatcaaaaaacaagttgtagtccagcataccgtgtcagtgcttcgtggtacttagttttgaaagctgaaacgtttcttgcaatgttgtattttatgattatgtgtaatattaacactctagcgagagattaatcatgattgttcagaaattatctgttaaaccttaatttaaaataaaatgatgtttaattgagagacatcagttgtaatactgatttaaagagccacttagtgaaggaaaaattagttaattatatcaggttattttaaactgaaagaaaaatagcattctgctaacttataaagtggcaatgtttaaattgactgaatcctccatgccctgctgctaaatcattttaggatattttcacacctaatttctactgaggttaattaacatacttggagggacctgtcattatgtcggaaaggcaaattttaataaaactgcacttgtatgattttttaagaaatctctcctaccacataggatccagggaaataaaaagtctctctagttcctcctcccagatagatgctgatatatgcacacccacacatgcacacactcacttgggctgacacacacaacatattacacacatgcaacatactacacacacacattcacacacattcagtctgccacacacagtcttctcccttctccccatacatggttgcttgtttgagctgacacatacataaacacacacactcttgctcaggctgacacacctacacaacataaaagtttgtgtagccaacagtgttctacccacttttccaaggggaaaattgcgtatgcgcatgaactttctctttctcagattgacacacataaactcacattgtctcctgcaggccaacatgcatgcacacacacagacacacatgcacatgctcaagctgacatgcacacatacctatgcagacacacacacagccagtcatgtgaacataaccacatagacccattcagattgacacacacacacacacacacacacagagggttacacacacagacagtgatgtctactcacacacagttaagctctggctttcttccccggtgttttgttgctgacctctgacttttctgcctttgatttacattctcttgatctttaacttagaggtgggtgactcagaccaattatttcatgtgattacatttggagtgaaattaatggttttgatactggctcacttttattatttgcatgtagtttaagaaaacttcatggatttattctgctttaatatgtgaaagtgaaagttgagagattacataagtagataagaaattgccttttaatatatacctggtgagtctacagggtgaaatgggaaattggcaaacaatatatcatgaaattcaagaaacaattctctattttgccaaattgtagatcaatgttcttatgtcactttgtgctactttcagttacttgctttcattgattataataataaacactatgcacaataacaatgatacaatttagtatttcaataggagacaatgaaaaggtgggcagttgggttgcttttctgaaattgagagctttctgtttgtgaatatataaggacagatatttgtccttcttcgattttcaacagaacattgaaaatgcctagtgttattcacaatgaagcttttacacaatgtgtaaaagattggaaagcaacatttgggacacatcagatgtttgtttcttgaagagaatctggaaatcatacttctgggattttgttactaatgaagaaaaagggaaaaaaatcttccataaaccacactggtccgttggtgcatatcttttgaaaagtaaaatgagatgagagaatggcaattagagtacagtatattatattctgaaaggaacaactaatatttctgaaatttcatgtttaaaaatgtgagcttttatttagatatttattttattcagtcactttcttagtcttactagttagataagagaactttaggaaaccgtacctaggacaaacattgaacttctatttgaggaagcccccattaggtatagtgtttagagaaattgtctcccatgtggaaacctaggcagaagatcctcctgctctctgccctcttcccaggaagcctaatcaggtagggccttaaggtcttcataaagactttgatttttactctaagtgaaatacgaagtcattagagacttgtgagcagaagagtgacatgatctaacttacgtttgtttttaaggaatcactcccattacaatggggagaacagattgcaggggcttaacagatgacggaaaaggtcccttcggcggggaccaaggcattccagaggagaaatgactgtggcttaaactagaatgaaagtggagagaagtgattagatcctggtgtattttgaaaacagggtaaatagaatttgcagctctatttgaagtgggcaaaaagaaatggagacccgttgatgattccaaggtttttagccgaacagcttgatgaatgaagtttccgtttagttaaatgggtaatttggggatgaggagtacttggggtgggggttgcttcttggcagtttgatagacattcaggtagagtaggcagttctgactgagtctgaagtttaggtgagacattgaatctgcaggtgtgtgtgtgtgtgtgtgttatatgtaagttgtcagtgtacaaacatatttaaagaaaagagcctgaatgagatcaccttgtgaataaatggatgtaagaggcacaaagactgacccttggagcattttaacatttataatcagatagatgaaaaggtaccagcaaaggcatctaagaagggttaatagtacagtggagtggtgtcctggaaacaaatacattataattttcaagaatgaaggattcctaaatgtgtactgtaacacataacaaatgtcaaataacatgaggactgtgaattgaccactgaatttgcaaatgtcgggggcattagtgacctggttaagcgctagagtagtgttgaatgaatcaaagaatctaaatcaatgaatcaagcaatcaatcaagatatggcatagacatgttaaaagaattgttctctggtaaagaagatagtaactgtatttggttcctgaaacaaaatgatttcatgatcttgacatgtgtttaggtaaacagaaataccggtatagttcttttccctattttcaattagctcctgctcccattcagtttccataatctttatcattcttctcaagttctatttcagtctcagctgatgagcttccctcatgcttgacttaggtaataaaagtgaacatctccgagttcagtgaatgttctgctcccattacctgcatataaatctatctgtatttgcacctctccagtacttcctcctcacaggtatcaaatgaaagatgtccctcctagacaagtctctctacctattctcttgatgtctcttttctgcaggatcctggtgacattcattgttcctttcttttaagcctttgtcctcttcctctctctattgcttctcccagctcatcgatttgtttgctcatagctcttcccgttttgaaagcacaggcctttccccaatttgtattcccgtctaactagacaaaaacgatagagacatactgtgaagtattttagaaataagggaatgaagaatgaagaaaatcataatcacccataatcttattctcagagatgatcattatgtgtttacttaaatttttttatatgcatttttaccaactgtgatgcaactatatatacacttttaaaatcttcctttcattcagttaacatcagtgttattatttttcttcatgtgtttgtttatttcagctagttaaggccatgtagtaaattgtatctcagaagtcctccagccctggacttcatgtacttttccaaaggcttgaaatagtttaaaaggtttctacatgaaaaggcctccacaacatttatccacacagcctgagggcgcttcagtatctggacttggtggagtagtttttggggacaagaccaggtcgccaccattgagggccctacagtccacggtctctatgatgtcgaccatctcctgcttgtcctccatggcccagttaatcttgttgttgccagtccccaagacaaccatgatgtgcttgttcctgaagaaaaacatgatagtgcatggatcatataactcatacattttgttgaagtcaggtactttggtaatattcacaagaaaaataactgcaaaatctttaaccttctcaatgatgctgtacaagaccttatccattttcatgcatgtggggtcccagccgtggccgaagcgaatgacagccatgcagtcctctcctgggaggatggcctggtccacctgccagctgctgtggaggtgcaggagcatgtgtgacatgatggcccacatacttgccactgcccaaggccaggtgccaatgagggccctgcgtgagaagcacagccggcccctcactccccagccccttctgcccctgaggtccctgaagacccccagggcctgcccataaccccccagcaacactgggcctgcctcattcacataactttgtaacactttccacatgttgttaaacaggtttgtaaataactattttaaatagctagagtatttgatactgtggttatgctatgatttatatattcattattttactggattttttaacctactttctatttttgatttaaataaaactaaggtgaatgtctttgtgtataaatcttttactacattccacattattttctaggctagagtctgaaggaaattgctgagtcaaaggatgtatactgttttatgactcttgtttgctattgccagattgtttttaaaaatcattcttccaatttatatgcctgctgggaagtgtaagaatgcctttctcctgagattcttaactttaaagagattttaaaagttgctttatgagacagtccttgctaattggacaatttaataagtgttatctaattttttaaacatatttatttgactactatagggtggatgtcactttaccatgtttacagtagtcatttatttttctattatgaattttccctgcttatcctttacccatcttccaccttccctgaagacgttttggtagttttttgttgacttgtatgatttatcatattaatgttgtcaaccatttgtctgtcatagtggctgtaataattttttccagttttctgccttttactttcacgcatttattaattaaaaattttaggagtcaaatgaccaatttaaaattaaactgtccacaaaattggaagccccaaaatagacccaagtaaataagataaactggcatatgtttaaggtatttaatacattggggacagatgtccaaatctgggggcaaacactgttagaattctttctcatatgtcataccaaaataaatttcaagtagactaagattcaaatgttaaaaaacccaaaaggcataagagcatgtgaaagaatgtaagtagatatttatataatcatgagatagtgatgatctttatcagtacgtcaataaaggtagaaaccattagagtaaatatttttaaatgtgactaatttgaaagcttccacacaataaaaattaacaaagataaaatacaaatgacaagcaggaaaaaatagttataaaaatatggaaactattgattttgtaaatattataggagagctctcttgcaaataaattttaaaattccaaatagaacattgatcaaagaacatgaaggaataacttagaaaagaagaaatattaatgactaagaaatatttaaaaaatcaaactttactagctttcaaagaaagtaaaataaatacataatctttggaaatatataaatgtgctttgtttttgatactttctagtaagtgaatgactcacatactgagtcattcagtaaggtctttaggtactgagcatagtactcaatagtttgtcaaccctttcccccttctctccctctgtgctctagtggttgccggtttttattgttgccatctttatttccatgagtacctaatgtttagctcccacttataagtgagaacatgcaatgtttggttttcagttggtgtgttacttcacttagattaatggcctccagctgcatccatattgtggcaaaacacattatttcattccttttttatggccacatagtattccatgatgtatgtgtaccgcgtttctttatccagtccaccactgatggacacctagtttgaattccatgtctttgctatcgtgaacagtgctgcaatgaacatgtgagtacatcagtgtttttggtagaagaattaattttcttttggctagatacccagtaatgggattgctgggttaaacggtagttctgttttaggttctttgagaaacctccaaactgctttccccagttgctgaacgaatttacattccctccaacagtgtataagcattcccctttctctgcaaccccgcctgcacctgttggtttttgactttttaataatagccgttctgattggtgtaacatagtgttgtcattgtggttttaatttgcatttctctgatgattagtgatattgagcatttttcatagtttattggccacttgtatgtcttcttttgagaaatgtctgttcatgtcttttgcccatttttaaatgggttgttttttgcttgttcaattaagttccctatagactggatattagacatttgtcagatgcatagtttataaataagttcttcccttttgtaggttgtctgtttattctgttgatagtttcttttgctgtgtggaaggtctttattttaattaggtcccactcgtcaatttttttttgtgtgtgtggcagttgcttttgaggttttagtcataaattttttcccaaggccaatgtccaggatggtgtttcctaggtttttttctaggattcttatcgtttgaggtcttacatttaaataatccatgttgtgttaatttttgtacatgttaaaatgtagaggtctagttttattcttcttcatatggctagccagctatctcagcaccatttactgaatagggagtccttttcccattgcttatttttgtcaactttgtcaaagatcaaaaggctgtaggtgtggagctttatttctgggttctctattcagttacattgatctgtgaatctgtttttgtaccacactgttttggttattacagccatatagtatagtttgaagtcaggtaatgcaatatctatgactttgttctttttgcttaggattgctttcaatatttgggctcttttttggttctatatgaatttaataatagttctttttagttctgtgaaaaatgatgctggtagtgggatagaattaatgttgactctgcagattgttttgggtgatatggttattttaacaatattaattcttctaacccatgatcatggaatatttttccatttgtaccatctctgatttctttcagcagtgttttgaagttatcactatgaaaatcttttacatccttggttagatgtattcctaggtattttatttttgtgtgtgtggctattgtaaatgagattgcattcttgatttggctctcagcttgaacattattgatgtatagaaatgctactgatttttctacattgattttgtgtctgaaactttactgaagtcatctatcagttctgggaaccttttgatggagtctgcagggttttctaggtataaaatcatatcttcagtgaggagggacagtttgacttcttatattcccattttccttcttgaatgaaagctcacttaatctttatgcactatcttgttatttccaaaaggccgaggcatgttaaaagcctctattccaccatcttggaagagaaaacaaccaaaattgacttttacaccagtagttgaaagagaaaattggttttatttgtgtttacttccaaaagttttattttaatagaataagatattttaatagaataagatattttgtagtgattggaaatgatgatgatgatgatgacaatgtggatccatatttatttacatggaacacactccttaatgtagaaattaaaaactttaaattataaggcaactacaatcccattcacgaaataatttttgtgattttttgtatatatatttgtgtcaatgtatataaacacatactaaaaaaataaagaatatattctgaaatgtaacaatattttctcttgattgttagtaaaatcaacaaactttcttgtttatttttatatgcattttaagatttcagattttctcacaaattacttttataattataaaaatgtatttgcattttgaaattgtctgtttttcttttcttctttttaaagtcattttgctctatgcttaacgtccttcctttataaaacaatcacttaaaaattttttttaaaagctcttcctatctggaatttatttgatatatagtttcagatgagattataaattcccctaagaagacaatattcaaaatagttgaccaagtatttcagtaacatttattagataattacatattgactcctgatgttcccttttcaaagattactgacatatatcaatctttctgtttgaagataattctgttccattggtctcattatttttgtggtattacctcactcttttcattattatctcattacattgtatcttaaaactgataagacaaatgttatttttttcagaacatgcttacatatttgtttttctggatgaatgttagaatcagtggcttaaagtcattttcccacagttcttaaggtatactgaataaatataattttttttctcgataattcagggtcatgattcattgtgaatcatcataagtattatagcatttttgtgagttatttagatacgatggattttttgctcgtgtcccacgtgacccattaggtttttcaaaatttctgtaataaatttgtatttttcccatgtttctttaatgatacttccagatgtcatacttatgtctttttaaacagcttttatctgtagttgaatctatgattaaattttttagcactgtatgtagcataagactcaacgatagaactctgtgacttgtattttgattgttcttgggtcttatgtgtatatttccttggccatgtttcatgtaatttagattgccatgttaatgactagttaagtggggcattactatgtttgcacgtgaatatgaagatatacaaaatagaataagctataaaggtaacagagcataattcaatggcaagaaacacaaagatagaagagagagagttttactgaaactctttacgagttctcttcatgagacaaagttctttacatgccataacttcttgatccgtccttccatgtaactgaatctcagattagattactttttcctgaaacttagatggtgtaatataaatgaacagagtaaggggccagtaaactaatacatggatactaagtgattttttttctttgcccttgagcttttatgttttcatattctagaggcagtaatcatagcttgacagctatcaacctgattcaaaattattaatcctgaatgttttctcttctacatggaggagaaactaccaattctctattaaatggtagttaaagaatatttcatttatctatttcacctattgttatctgtctgtcctatggcatatttttccaggttaggaggaacacattgctgatattttcataaacatgttgccactgactttattttcctgttaatcataatatgtgttttgttgtttttttgcaaagctgtaatgttattgctgtagtagaaacaatttcttttgttaaggctctaaagggaggtaggacccatcaaagttaagggcctagacacagtaacagatgctcctgtaaagcaatgtttctcaaaaaaggtcttcgatgaaatatatgtaaatctcctctttgtcatttatttttggaatgttctctgttttaccacacttcatttgtttttatatttttattatgaaatacttgaaatatagagacaagtatacaaactagcttaccaccatgcacctgccacccaattttattaaacctcaacatatttgccttagttattttttttaggccagcactacattacagctacagctgatgtttctgtgtgcctttgctttatccctttctcttcacaggtaaccatagctttgaatttagtgtgtaccatctccattcttgagtgtgcactttactttgcatgcatgtatcatataaaaattataggccgggtgcggtggctcacgcctgtaatcccagcactttgggaggccaaggcgggcggatcacaaggtcaggagatcgagaccatcctggctaacacggtgaaaccccgtctctactgaaaatacaaaaaattagccaggcgtggcggcgtgcgcctgtagtcccagctgctggggaggctaaggcaggagaatggcgtgaacctgggaggcggagcttgcattgagctgagatcccgccactgcactccagcctgggcgacagagcaagactccgtcacaaacaaacaaacaaacaaacaaaaagaattatatacgatattataaatgatatttgtatgttgtttaactttatataaatggtagcctgctgtattctttccttccttccttccttccttctttctttctttctttctttctttctttctttctttcagacggagtctcgctctgtcgcccaggttggagtgcagtggcgtgatctcagctcactgcaagctccacctcccgggttcaggccattctcctgcctcaacctcctgagtagctgggactacaggcgcctgccaccacgcccagctaattttttgtatttttagtagagacggggtttcaccgtgttagccaggatggtctcgatctcctgaccttatgatccgcccaccttggcctcctaaagtgctgggattacaggcgtgagccaccgcacctggcctttttttactcttttttgaggggcgggggaggggatggagtctccctctgtcacccaggctggagagcagtggtaagatcttggctcactgcaacctctgcctcctgggttcaagcgattctctggcctcagcctcccaaggcacacgccacaacgcctagctaatttttgtatttttagtagagatggtgtttcaccatgttggccaggctggtctcgaactcttgacctcaggtgatctgcccacctcggcctcccaaagtgctgggattatagatgtgagccaccgtgcccagccttattctttaatttactttttaatttgacattataattttaggatttatctatgatacagctagtagtttcaacttattcatttcagctgttgaatagcattccattgtgtgagcataccaaatttatctagtcattcacttatagacatttatataaatgtaaataatatttcatatccatttaccaatgcaaacatggtagaaacggacatttctctgtttatttccttggcaagtattttctcaaccgtatacctagaagtgaaactgctctgtcattaagaatacatatcttccgaatgcctcctgatagtgtttgtaccaatttataagccctctagaagcgtatggattgccattgctctacatcctcatagtattcattgttagacttttaaatgttctgtcgttctgtatatggcgtgaaattgaattctgcaattttgtatttccctgattactagtcagattgagcatcttttcatgtatcatatgtttggaggcaataatagtattgggttaagagctggatgtaaaagccagataacttggttttaaatcttgactcttctgggtgaccttgggcttgccaccattttgtggctcattgacaaattaggaataataatcataccaacattgtggggtttttctgagttaacatgtgagaatgtcttacaagtgtgttgagccttaagtaagatatcagtgttacaaaacattaccaagatgtgataagtggggtgtaaaaatttagtgatgtaaaatatcaggttacgttattgaaaggttaacggctctaatcagccttatctgcaaagaccgggatggaaaaattctggggactgggggagcctaggcttcccttcatgacctccatgcctcaccaacttctccctcttcttattcaaaagataactttagctgaagacccaggcagaagacaaggagccaattacaaagcatgaaatatcctattatttaaaattgaggggcatgttgtcttagaattttattatattattaactgtttggtttttccttatgcaaatagcttgtttatcatcttgtacattttgtattgggttatttgctttttattattaattagaatgagttctttacatattttggacattaatctgggtaaatttattttcccagtttctggcttgtcttttaacattgtttatggcatttttttgtctgtttgttggtacaaaatttaaaatttttagtatggttatatttaacaatcttccttaatgatttctgctttttcatcaggtttaagatatttttccctgtaagccaagctattaaagatactctcccatattttcctctaaatgttatgaagtttttgtgttttaaaagcaaaattctctctggaatttatttttatgtctagcataataagttagagagctaattgtccaagcactatttattgtaggactccagtgtcctctttgtctatccattatgtaaaatgacactgcctttgttactgtgtctttataatagcagaaggaggaggaacagcagcagtagcagctaaccattatataggtcttactgaatgccaggcaccattctatgttttttacatattcatttaatccttaactggatcctatgaagtaggaactctcattatttccattttataaataaggaaactaagaggcacaggcaagttaggtaatttgccacataaacctatagctgggattcaaacccacgccttgaaaccaggagaagacacagacataaaaagaaataattataataatataatttgttaagttacagattagaattatgagagcttaatctaagaaatacctaccctgtccaggagtttcatgaatggtgttttggtttcatcttgctataacaacccaaaacttagtggcttaaaaccacaatcattttattatgccttacacatctatgggctaaaatctattgagcatgtgatgatgcctagagttgcattcatttgggacttggctggaccggaccatccaggatgtttcattcacatggctgatggttggtcctggcataggctgggagctaatctggagtgtttaaccagtacgccttggttccccccatgtaacctctccatatggcatggttttttcctagtacagtggccgggttccaagaacagaaagtgaagactgagaattctcttatggcctaggcttgagagttccaggatatcactttcacctcattctgtagtccaagccagtcccaaggccagattcaacatgagggaattgaattgcccacctcttgatgagaagagtgtcatgagtatattgaactggaggaattgttggaagcccctctagagattatcaatgacagagggcattgctccaaaaggaaatttgttctgaactttgaggaatgagaagggcttcactagaaagtattaggggaagaagatccaggcagtgggtaagaacagaggcacaaaggagcataatgtgtttggataggagttttgtgctgtggagtcacaagggatgtagttgataaggtgtgttcgaagtagtaagaaaataatagctaaaattcaagtgctcactgtgtgcccagcacatcctgctctttgaatgatttatttcttttatcctcataacaatcctgtgaaggagagactactattatctcaattttcttgacaaggaaactgaggtacagataggttaaataacttgcacatggtcacataccttgaaagcatcagagttaaatttgaacacaggtaatacgcctttagagtaccttctcccccactgctccattcaggctcctgtagatcatgaaaacgtttatgccatattatatcttgcctcccacagactgtgtatgtcatgttatggaaatcaggctctgagtaagaaactggagcaatcccactggcattctaattgctgtattcttaacactggtccagatgtcttagaagcacttgagtctttgagtccctcaggtgttgatagtggctccatggtttcaggaggtgtaggtcaagtgaagaggtcttccctctatgtgagtacatcttctggtaatgctgaaggtggtatttgtgagaaagctcagcccagcaataatggtagtagcaaaactgacaataaggttccctttggatacacacagagagagaagcagttgaaaacaaaaaccagtgttggagagaagcaaagatgatgataagcagaacagggataaacagatttgtgttggtaacacagttgccagagctgctttggatcccaaatgaccttccgatcttgaacccatttctgtctctccaagcctgagttgagttcttgggtgctctaattatgtggtggaaatgcctgtctttcttatttccagatacaggattataatcaatctccattgtgtagcacaacctgagtgaatttttactcttataatcgaaagatcccaactaagttggatatttagttcttagcagatgctctgttactggctgtatttttttttttaagaaaggggctgagcctctttacatctgaattatctttctttgatgctttatagactctagtccagggctttgcactcagtaaatgctactgatatttgctgattgattgttctgtccattgagatttgtaacatgtatgttggtcatagtcaaataatgataatgtgcaaaatatcatgcacagtttataaatcttataatatcgtgcttctacctctgagctgttccattaattagacaagagaattggtctaaacattatttgagtctttaaaataattttatataaacagctgatgtttatattaagactgttttttagatttaaaaacatttttattcaaaatcaggcatatatagtcatgcactagtaaaaatggtctcagcagtttattgcttcccatgggtggcacattaataccacactgattactttgtctgtttttttgttaagtataacgaaacattactgtggaaatgttcatatttactaaaactgtgttaccttagaagacatatgccctgtgtcacaaagattaatctactgaactatttataatataataaatgtcatgatgaacaacactgactctgaagccagattctctgaattttaatttcatccaaatcatgtatgactttgggcaagttacttaagctctctggcctcagtttcttcatcgtaacatgaggatgataaaaatgtttccctcacaacagtattctaaagattgaatatgtcaactgttgaatgagttaatttactgttaaagcacgtgacatgtagtcagtgatatgtaaataaggcttagctattgcgtttttttaatttactgttagtttctaaggctggcaaagacattttattttaagttccattttaccagtagttttatctgccaaaccttttgggtagcagtaaaagaaagcagaacagcagaccttataacaagcagcatagtatcatggagaacactccttctctgggaccagtcactttacctctcagaaatttcctctagttttgtaagttgtaagcatgcctgtttgaatcactgtcattcagcttcaaaacagctgtaccattctaaagtatcagagggtgacataatggtagaacacagaacacttgtagaaatacttgaggaatgagtctgtgaggtttaatttgtgctaaaaattcatcaacacatctagagcaacgcaaatcttcccaagacagatggagactgttttaaggttggtttcatgattctgattgggactgttttaattttatcattggatacttcaaatgaagggatgaaatgtagggtaaattattatctaaaatagcccttctgttaagatgtagagagcagaatgtgaatttgagagggggaaggaattaatgtagtaaatgggactggagacattaacagaaggggcttagaaagaggtgaagctaaggaatgtagcattttaaatggatgatttaaaatgatgaattacataaacgaacatgcccaacaggatgcataaggaagagtgtgaagagggctgtctattttaaagattggaataagcagtacatatttggagggtctcagagtatataaagagatctggttagcatggcagccagctgcttacctctgatgaaataagaaatatgcttaagctgaagtgtaaaggatttggggtaggctttttaaacaataaagattgttaagcattgatttgaattacgttatttcagtcctggtaatactgagaaatagcttaactgctaatcaaccagagatgttcccatgcaaagattaagtgatggatctatgacatcttaactacaatttggtttgctttatattttagtatttcatagcaatttcttacttgaaagtataaaattttctcagactctttccttctgccaccctttgtttctgtcagacattctgtaattttgtatattgcaactttccatttcttagttcctccacagtgctgtgattttgtgtagatgcattagaagaccactctcagaaaaatgatatgcctgcctcttaaatcacactctaaaaatgtgatgtgtaattgttccatttcattttttattttacaaatttttatatggcaggggccgtgataagccctagaggttcaaaattgaattaggcataatttctctaccattgggatttactgtgtaatgggttgaagatagacatgactacaataaaatgctagaagttatgtaattgaaatgtgacctggcaccttagcacagaggagggagttgggaactttgtcttgggaggatgtgtacaccaacaaatatgccctcattccacatctaggtacagggaagtacaggaagtacaggagatgtacagggagtacatctaggtaaggggaagttactgggaacatttgtcattggagcctatctctaccccagaccaggagaaacttggtctaaagcactggaaaatactttagatcaaccttgatcattatggttcatataatcactccttggcaaggcctccgtgagcagctacttcctagtaacaactccatagtatgaaggagaaatcacaagttttagcagaaaagtgcctatatttgcctcattacctcctgaggatattttgagattaggtaataaacacaaaagcacctagcaagaaatagacactgaagaaatatgtattgaaagaaaggaagggataccaaatggaaggtgtaggctttgtttggattctaacttgaacataccaaccctgaggtgactattttgaagcaattaggaaactttgcttatgaattgggtaacagatgaaatcaaggaaccactggcaactttagaatggttgaaataacattgtagttatgtaagaaattgtctatccttttaagagatataagctgaagtgtgtctgaagtctgagctttgctttaaaaggcttcagcaaaacattaaagaagagatgatgtaaatgtggcaaattctttatattgttaaatctgagtgatggatatgtggaggctcattgacctattctctctgcttctgagtgtgtttgaaaagtttcatagctaaactcctctgctcttcctcccccagtgagtgttcataactagattggtagcttagatatacaagtattggcagcatgcaagatttaattgaaaagaagaaaataataggcaactgcaaaattcagaactaaaaattctatatacaatatatatttttatttttacatgtgagcttaggtataccccttcaatgtgcaatccctaaagcagatatccatttaaaagcagaatggcaaatttcctcagctttgatttcaaactgaaatcatgttcagagctcataggcaagaatgaacaattttaatggatatgatttgtagtgtccaaaaagggcaactataaataaatctcttatttattcccattgctttattatttgcagaatcacttttcaaagtttatgtcatataatattctttctttaacaaagtttatgcctgtttaaaatattttcaaaaaatgattaatttcattgttttattttcccttaatataaaatatagatacattttatttccaacttagattacataaaagctttggagatgaattttcagaaatgggtttttatctgaagatgtattttctatattgaataatcagagatggaattaaaagtcacttgagattagcaggttgctttattcgaaaatgttttatctgcttttagagttttagctcttggatgtcagatcaaaattctgaagcatgttcgattcatttcagaattgaatgtcaaatccaaagacagatatttataactgagttctgctcaggcaaaaactcagtttctggactgccgcttggatgattgcaaagctctcattcacagttgacgttaccatcattttaaacaaacaaattaaaactttgagattggattttagcaaaccagccatttaattccctgcttattatgctttaagtttgcagaatgctttggggtctatatattgctttcaaataattattttttcccacaatagtactctggcattggtggtagtattttcacttgactgtaagaaaactgaagttctgagaagtgaaatgacttgcctaaagtcattcagctacttagcagtttagctaagatttccatccagttcttctgactacgagtttttccattttaatatttctattataaatttctacaagcaagaaaccggtaaaaagaaaaataacttacatgctttttacataccaatatttcaacattttaatcaatggaatatttgttcctgcagatgcctaaagaggagatgaaaattcatctactaattttcagcagattttaatgtaaaggaatacaacactgactctagcagaaatagccagcttttaaaaaaagtagattatggttgttcccttttaacattgatgccttaaatgaaagcttgaggtatgcttttaaaactaatcatcaatggatatttcaccatgaagcaggacacctttttcgttcgactatgttgctgaatcagtataatcattatatagttgtatataattatgtaattgtataattaacaatagaattcagtataaatgagaaaagctgtacaatgcaggaactattgagtaaaataagcatgacaaataaatgtatatatagtgtactactcttaccaatcacctgaaatgggagtgtgttgattaggttaaaatcaaatatctaaatatcaccaaatcactaaaatagaatggataaaccattaatataaaatattattcttttagggaaagaaagggcaagtagctaagttagaattccctgaataaaaccttttatgtagataaaatttggaaacaacataaatgttttaaataattataaaacaatattaaatgtacaaagccattcctaaaagtcaaaagcaaagtgaaataaacaaccgtgtaacaagtacatggcataccacacggaaaagagcttcttaaagctttaaccacagtaatttgactatacttaccaaggaatatataccatgggaacaaaataaaaggtaaaaagaatttaaattatttacagtgagtgtgttattggggttagtaatcatattgtgatcctgacactagtattgtgagataaagcagatgagtaattatgtttgtgtccttgcatactggaattttgggcattggagaaggaagataaagatgaagatcagtgaagatgaatgaggttgatagaaaacttgtagtcctgaatttgaattacagtatcagtatgaacttgtgatgtattttatttaaaaaatattttctagctctatccactgaaatggcctacaaacaatgactgtataatattgagcactcctagccaccagacttgtagtatttaaaaggcgtgtcccactctgaggaatggggtgtccttggagaaatggttgattctagggctggggcaggaaataaagaagagataggaagcaaggaagctataaaggctactagatttgtgtctcaggagtccatttgaacaggctcttactaaccaaagatggaacaatttgattataaattcaaataatatcagtaatagatcgaaacacatgagatatgttagaatccataagttggtaatgatacttaaaaaaagatccctccgtggccacctgtggaagattctagtggcccaactcagtactttgaaataaacacagggaaaaaaaatgaagcattttcctcttttctctataaactgtacctcaggataatcaagaattgatgacaggattttctttttgtaagagtatattagctcataaatgaatgaatggtaggattagagtattactatcgcacaataacagattgaggtaatgaccactaagcagctggtcatgtcagaaaaagacgtgaagacatcatatgcctcctgatgaagtcccataacttattggtgacaaagattagatctcaatttgatcaagcctctagatctgactatcggttttcagaaggaaaagaaaaatgaatgaatgcattaaaatataccatagggatacaatcagcaaaacctagcctgtggaaaactctgaagtaccaataatctggtttctttcacaaataaattgcaagaaaaaaatgtgaagaggaactataggctaaaatagtcttaaaagacatatcaaccaactgaactatttggaccttattcagatcctgattcaggaaataactggggaaaaacatgcagatgaaaattggggaagcttaaacactgactggttatttgatgctatgaaggaattgttattaattttaaaagtgtgatgacatattgtgtggttatgtattttttaatttacatcttttagagacatactaaaatatttataggtaaaatgatatcattcttggtttgcttcaaaataatatggagagaggagacgtggcagggagtatatatgaaacacaagatgttaatttgtcaaaattgggagtgaactatactatttttactacttttgtgtaggttttaaattttctacaataagattttaaataaaagtgtacttaagatggacctcagaggttgtattatggagaaaagtaattgtttctgtgaaacagttattatattaagaagaatcactggttagggtttttttttaaaccccattcccaaaagtacattcataataaaatgtagttaacatttcttaaatatcaagtatgtgccagacagttgctctagtcactttacatgtattatcttgcttaaaatttaccagaatcctgtgaagaaattctactgtcttcacttttcagatcattccgagagattaaatgtctttaaccaagacacagctggtagagggtgctgtcttggaatgctgccctttggctttcggtgctggggtgctcaagcctactctgttcagcctgaacagtccacaggagtggaggctttgagtgacagtgtctgctgttataccttttacattttcttgatcagcactctttgcccagactcaagactttttggagagattataatttgcatttcggctaaataagagactccaaaactagtcagcctgctgcaaggcagtactagccactctctgaatccttaatgaggcgagctgtttcccttccccacaagatggggggaaaagaaagcacaattttagttttcacatttttcttgatcaattgttccaaagtggttttccttagtatagtgtattcaaatggactgctgtctttaggcagtgctaggatggtgcatcctaatgtgagacattctccttatcatgcatgtgcacacaggagtgggggaatctagtaagaaacagcaatttcagtactaagaaatgaaaacagcccttaggtaaaactgatgttgccccagggggatagctccctcatcttggatctaggggagcttataacatcttttaaaaggcgaaaattcaagttatctgtggactgtcagaacattttgcataagtcatccccaggtgagtaaattaaaaacctcaagttagtaaaatcttctgcaaagtgatcctctcttgtaaagttgctgctgcttgctataaatttcctcaagattggtataagagtacatgctcttcaatcttaaaataagttgtttccccacctttttttgtgggtggatttttctataccccaagcaagcatagtcaagttaaaccctccatagtttctgtttcatggaaaaaagagggaaataaattggcatagtctatagtagtctatttttttggtttaaatggaaaaattacctttatgactggagatacttctcactgtgtgtaggtgctgaatggcttcaagatatatggacgttcaaaaagagattcaattaaactggggattgcttcataatttaaaatatgattacttctaacaggaatttaatgtcagctttctgatattaattattgtaaaatttgtgtcttattaaagtcagccaactcaagtcactgagaccattccttatttcaaaacactgtaataacaactgaaattagcgaaaataaattcttaagtgttggttcacatagaaaaaaaaatgtaagagaatgaaaactgggatttctttctagatctttagatatatctagactttacattatttataatttatgagggagaagctatggctatctctttgtatcaaatttataatctcattatataaaaatgatttataatgcacacaccacagtgcacccatagatgttgcagatagcactgacaacatacaaaactccccaccacagttaaacagggtattctcatctacctctactctctttttgccttcaagggatgatctcacccccataaaatgaaaatcgtagaaaccttctagggttagttcctttctataactctaacttttcccaacagttccctgcgtctatatttttctgctttttttcccctgaaagttttttcttccctctaaagctttcttacctactatatttgacatcccttcggcacctccttcttctgagaactttctaccctagttacccctcttttcttttttagcttccttgatttcaggctctttgtattatatcttcaaagtcactcaaattttttctctctagaaaacatttttcacttgcttccactggcctcttcctttcttagccagaatcctttaatgcaagacatattactgttctctgctattccttattttctcattcattttttaaaaattctcctcctcacatactcttcccattacacattctcatggcttcagatcctatctttacactgatgatacccccagatgtatctccacccataacctctctctgtgtttaaggaccaatttcttctctttaatacctaatcagatcctgctcagcggtgtccccatctcatccaagatgactcctgaagtcacattgatccctctttcctctattatgattgcagattcaaggtaactaggcctaaagttatggacaagtggatgttggttcttatttccccagtaagactttaagtttctcaagaccgtatcttatgtttctctttcctatctctacgccaaatcaaatctagagaaatcgtaagaatcaaacagttattaatattaggaggcaataaatgtgtcctttgggggaagaaaacgtcacttacatgacgagagaattttagagttactgacctacaaaattgtggctgttttattattattttagtaataaatgctcattgaacctttccatggtaaatagcattttattaggttatagaatttctagttttagaatattctgacacctccagaaactgataatctgtttacaaatttagctacaatatatacactctactagactaaacaacacaggtatgggtgcataaataataaatattatctatcataaatttataaatacctgtggaggttgggtgggcataatggtaaggtgtcaagtagaagctgatgttgagttaaccagagtgatttcccagagggagatggatttctatagattctggtttaagattgtaaaaacagaagactggcctcataagaacagcttgagttaaggatcaaatatagaaggcagtcattggaggcaacacagaaaggcataatggatacaaatccagagatgtaggtttaaactagaaaacagtctcactccaaaatgttgttctttcctctccaaactaaattattgccaaaactataaatatgtcatttgttcatataatagctaacattgacataatggttgcatatctcattttgagttttaaactgtaaagtaaagccattgcatgtgcaaagcattactttcttcctacctcctgaattgttctgcctcctctcctccctgccaactccagtatttctgttatcttttctttttacctgtatgcaccactgactcacatctgcccccagccacctgccatggcagctgttgccaactgtattagtccactgtcacaccactataaagaactacctgagactgggcaatttataaagaaaagaggtttaattgactcacagttccgcatggctgaggaggcctcaggaaacttacaatcatgatggaagtgaaagcaggcacgtcttacatgatggcgggcaagagagcatgtgtgtgggaagtaaaaggggaagagcctcttataaaaccatcagacctcatgagaagtcactatcaggagaacagcatggcagaaactatccccatgatccaatcacctcccaccaggtctctccttcaccacctggggattacaattcagtagatttgggcagggacaaaagcctaaccttatcacccactaacattttagccacagctggattccttcagacagtcttgtgaccttgctgagtggtagtgctcactgaacaaatgcatccatttcttttctcttgcaagtttcagagtacagtggaaagagcctgagatttggagttagacagatctgggttcatgtctgatttttccaatcattcaacatgtgaatttgcaatttccttattgtcttggaatttttctcctcatatgcaaagaaaaggggccattaattcttacttttaaggctatgaagggggattatgacaaaatgtgttccagataatagcacagtttctgccagaatggatgcttttcctcaaagtttctcaatgtatggtccctagaacacttggatcagaaccacttaaaatgaagacactgggtgataccctcagcctgtttaatttaaaactgcaggtatctatattttaagcaaatttaccagttcagccttatgcaaacagagctcaaaaatctccaggatatgtactcatgttcttccctttccctttccctttcccttcccttcccttctttttctctttacctcagttaacaagaaaatgtacaggaagcataagaattttaaggtactaactgcattaggttttttgtcaagttattttcacgtttcagagtttcatttttctcttatgtaaaaaggaaatgggccgggcgtggtggctcacgcctgtaatcccagcactttgggaggccaaggcaggtggatcacctgaggtcaggagtttgagaccagcctggccaacatggtgaaactctgtctctactaaaaatacaaaaaattagccaggcatggtgggtacacctgtaatcccagctactcaggagactgagacaggagaattgcttgaacctgggaggcagtggttgcagtgagccaagatggtgccactgcactccagcctgggcaacaagagcaaaactctgtctcaaaaaaaaaaaaaaaagaaaagaaaatgaaatggcctacttcttcagtcactgcttgaataaattattattaaagtggtatcaatcactcagaaaaggcacacacaaatggtaactataataaaaataattagagttgtgggggtccctctttattaagaataagaagcagtaatgtttatcttggcttataacagaacatagagttatcctagggctgggatgaaggtgaaagaaaaaggcacttgtcttgagtgaacactttagggggtgccaaaagtccagtaatcaggagaaataatattttgatattttagaaaataaaaagtaaagccgggcacggtggctcatgtctgtaatcccagcactttggaaggccaaggcaggtgggtcacttgaggtcaggagtttgagaccagcctggccaacatggtgaaaccctgcctctactaaaaatacaaaaaacaattagctgggcatggtggcaaggcacctgtaatctcagctgctagggaggctaaggcaggagaatcatttgaacctcgaaggtggaggttgcactgagccaaaatcgtgccattgcactccagcctgggagacagcaaaactccatctcaaaataaaaggaaaaagtaatgcaaataactcattaagaacaaaaaatcaaaattttaaataaagataggctcagtattatttttctttttgtttccgcttccaatggcttgccatggcactgttactgtctaaaaatactgcattaaaatattgcttatcttgattgctgaggtttttaaatttcacacttaagacaagcgcctcacctgcctcactagcctggccttggtttatcttcatgctgaatcatttcatatttaattagctaaaacagaatggttcattttcatgcactttcttggagaatctccacttacacttttaagtgacatttgtacaaatattctacttttgatacaaatattggaaaatatccacattttgaggatgtcagtatagctctcagggtttcagataagtcttcaaaagttacatgattttgcaaatgacagtgtcactaaaagactgtattaggtagagaagtagcaagactataaatctaagggcttgctactgtttatttgtttggggctcatttccgattatttgcaatgaaaactggaaaaccaggagtcaacaaaaaaggaaaaatgttcatgtagatcggaatcatcctggcaagagaagtgatcacggaaggagatttttgtataattaaatgtcagtttgcattttgaaatattgcctgctgcctcccactcaatcaccaagtgagatgagaaggaataatctctatgcaaacccagaactgacaggagcacttgttgggttccccgtgaaggatgagctatagatcagaaggatcagagcaaatcattttcccaaggcaataaaatgcagctgataaattacagcataaatagggggacattataattttcccctctaagaaaagcaaataacaaacaaagctgtgtaaacctttggaattttagaacagggaggaattttagaggtcatctggttcattctcctccttttacagaggaggaatttgatgcccagacagatgcctggtttctcaagattactatcaagtgactgacagagctgtcacttttttccacatgaccatgagagtatttgttaggtggtggaacaggtgagtggtacaatagggagtagtactgttctcctgttcctagtaggagaatggcttagaagtctttacatctgatatagtgggactgggaagtggagagacactattggataactactcagaaccatctgaacacacaagtttcttagcatttcaagaagtacttttatttctttctgccccattccatcaattacacaaatgccaaatttactgaatcagacactacaggcctgggcatgtggatttgggtaaaagcttactgggtgtttctgatgtgtacttgcattaaacacagctgcactggagagtcatttctttctgacaaatatgtcactgtcagtcaataacaacaatgtgaattaattcaggggtgagcttgagtggtagtgcagggtgaagcataagagcattaggaaataaatatatgaaaaggcaaaagaggagaaatcttccaaagcaaatatttcctcttttcaattttgtttcattagtgtaagaatggaaggaactgagatccatagttagcaacacctcagggagttttctcacttgttctgcttataaccagactaagctacttaatgccctacttagagctaatcaagaatcttacatgggccagttgtcatggaacataatactacaatattcatcatcaaggaatgatttcaaaggaaaagttgtttctgatctttttttcttttttctaacctcagatgtagagaactgagttaattatgctcctcaaatcataacatgttaatactcattactggttcatgagaggctcttttcttatatttatttccttatatttccatttccgccctcccatccccaaataggcaaacttctcttatgtttggcacgagtccttttaaaattatcccaacatgctacaaatagtttagtattttagtatgttttatgctcctcatctgcgtcattgaggtgagaggagagaggaaagaagtttgacagatgcttcaatgtgctttcaccaggcaggcatttggatgcttcatttcaaaatggtttacagtcctctcaatttttcttggttgtataataccatttaaattttgcttgttgatatgaacatggtatcccaagaattcaaaacaacaaattcagtccagtttattcttgcctgtcatcttctctatagtccctaggtgattggatggttgactgccagctgcctatatattgaaaataccttgtacccatttatatatttgaaaatcatgaaattggtctacagtctgatatagtcacccgaggatattaagatttgtttcagtggctgaacaaattctatgcatgctgttctttctcaaagttttttctatgtgtaagtcacagtgattttaacaacttcttaactttgatttaagaacctatctaaaaatagtggggaatgtactttatgaacatttttagagtagatttaacaattacacttaggggcaacaagtaagtttgtttttcactattttccagggtttttttttctataatagaattaagtcaaagtcgaccacttcttttatggggaaagtgagaacatgaagactttaaatgtcatcaaatgtaacattagaggcagtggagatatttgacaaggaaacttttaaaagatcaattataaaaggacaaaagactattcaaaagaaaatcaatatggaaagaacaggtagcaggagtgacaataaattaaaagttcaagcaaaatcagcttttcatcaggctcttgttccacacatcctctttctgggcagccttctctatttcacatcaactccaacttgcagcggggtgatgacaaaatgaacaggtcacaggagcatcctcttttgtttgcagcctggagagtgggtcatgccccaggaccatcataacactgatgttcaacaaggcattttcttctgttctcttctgaacagtctcggattttgattcttagaatcaaatgtctgacaatctcaattgctctgatattgagtctttgtggcctgttctcatcattgtcttttatatacctgaccttcttctcagtaattgggccatcttctgactgtagtacttttgggaataatttcttcagcaaagtttgcaggttcatttcctgacagccatatcatacccaccaaagctgcccacttttagtcttgacctggtgttctgaactctcaagggagcctcaggaattgctattttcttctcatgttactcttgagcatgttacatttgctgcatgctttgacccaatagaacaaagtctctggtctaaatctatctttgttacttattagttgcagtagcttgtaatagggtaactgcaaggggaagataagaacctgccaaaggaccagaaaatattgctcacaggaggtactgacttcaaactcactgatgtttccaaattaactgttacctaattatgtgtgtgtgcgtgtgtgtgtgcacgcatgtgtgtacatccaacattgtattttcaattcttccagaccaagttttaaaatattgtaacagaggaaaagaatgaaaatcacgttagtgtcataagttacactttttgacctgaagaagcttatcagaaagcttatattctctctatgtttaaatgattacagataaaaccttgcatctgctacacaattaatacaacttctgtgacttttaaaaagaacaagtggtaaatgatacctaaaatttgtttcagtgaattaattatagagccattcctttatctgatagttgctgtgtttcacaatttatcttttagctttcagagcagtgaaataggcaaacccctagtgtccacagcttgcaggtgaagtaaggagagaagtatattggaaaagctggacagatgttactgattgaacatgtgttcagctcctttagagtcagagccctagaatggaaactggacagccctgttctgcttctgataagattacactggaatggtctccaagatacagcctagaccgtttcaacgagttgaagaggaggacagtctttaagaagaaatattttactagtgtctaacaagaagctttcattctattatcttcccccttcccgattggctttcaatgtaaatacccaatagtggccacagccatttacacagtagtccaagatgccatatgtccttataagagatattgtattggttttaatattaagagatattgtattggttttaaggcttctataccaatattaagagatattgtattggttttaaggcttctatacttctatatattttctactacgtaccatgtttaaaactataatgacaaatataaaattatttttaaatattaagaatttttataacatagagcagggaacaatttttctaagctgaaggcagaggtcaaaaatgaaaaggtgggtagatttgaatatattaaaaataaaaacttaaatacatccataatgatccaaaaatcattacgaacaaaattaaagataaatgggataatgtttgtaaatatttgagagacagagtttatgtgttaaatatacaaaaaaaatccatcataataatgaaatataagttccagtggggaaaaaaacaaaggtcatgaataggaaattcacaaataaaagctataatacatggttaatacgtgtgtgaaaaactactcaattattgcaaataagtgcgtttgaaaatatgctgtgcttttcagattgactgagttctttaaccagctttctcagtattgtgagagtaagaaataaacactctcatacactgctgatagaagtgtaaattggtatagctaatctagagatcaaattggcaatatatattaaaagtacacctaggaattctacttccaaaaacttatcctaagggaataatcatggatatacatgaaggcacaaatacaaaaacaaaaaatattctaaatatctttaaatagtcaaaaatgaaaaaaaaaaaagaaaaagaaagaaacctgtcatatcactgcctttaggctccagggaagatgaagtggttttaggtggtccctaagcctcttacatctgaaggtatttgggacaagtggctaccagtgccttaggggggttacctaagattctctagtcttacccgtgttctttcctcctagggtccctacaacccaggaatcagacctcagtttggctaaattatctctatattgtattttgttgttcttatgatgttgaacatgaatatttaatgcatggaaagatattcataattgaaaaagtggaaaacaaaatcatatgcagagcaatcggatttttgtaaatatataattacatttataaaactagacaaatatactctaaaaatacagcaatacctcagatatatcatgggttggattccagaccaccacagtataaataacaactatcctaataaagcaagccacacagatttattggtttctcagcacatgtaaaagttatgcttatgctataatctaatcacatctaaaaaatgtacataccttaattgaaaaatattgctacaaaatgctaatgatcatctgagccttcagtgagtcataatgtttttgctggtggagggttttacctcagtgttgactgctgctgactgatcagggtggtgcttgctgaaggttggggtggcagtggcaatttcttaaaccacaacaatgaaatttgctacatcgatgtactctttctttcacaaaagatttctctgtagcatgcaatgctgtttgataacaatttatccacattagaacttctttcaaaattgcagtcaattttctcaaaacctgctgctgctttatcaggtaaatttatgaaatattctaaactatttaatgtcatttcagcgatgttcacagcatctttaccaagattccatctcaagaaaccactttctttgctcatccgtaagaagcaactcctcattcattaaaattttgttatgagattgtagcagttcagtcacattttcagcctccacttctaattctacttctcttgctatttccgtcacgcctgcagttacttcctccacttaagtgtttcttgaacccctcaaagttatccatgaggattagaattaacttcttccaaattcctgtgaatgttgatattttgagctcctcttatgaatcacaaatgttcttaatggcatcgaaatggcaaatcctttccagatttattttctttggattcaccagaggactcactattgatggcagccatagcctttcaaaatgtatttcttaaataatacgttttctttgtgagcatatagattttaaaaattttattgaagtatagtttatatccagaaatgtatgcctgttgtaaatgtatagatcaatggatttctacaaattgagtatacctcaatttgaacatgtatcagtctgctttgtgcttacttcaagtcattaaccttccctttgaacctccactcctcgaagctaatgactagcctgacttctaagagcattgatttgttttacatgttttcatgctttatgtaaatagatgaaattgtataatttgtaaacttctggactggcttattttgctcaatatttatcttgagattctgtgaatgggtaaatacattatattatgtctgggtacttttgagtttggaactattatgagtagtgcttctatgaacattatagtgaatatgtatccatttggtgaatatatctacatatttctgttggatatagtatacctaagaataaaattgctgggtcttagaggatacatatgcttagcttagtagacattggcaatttccaaaatggctgtaccactttatacttccaccggcgtatacaagttttggttgctgcacatcttcatgaaacacatattttctgtcatttttactttaaccattctggtgaagataatcatatcacattgtggctttaatttgcatttccccgatgacaaatgaggtggagtgccttttcacatgcttatttgccattgggatgtcttttctgaattcacagtttttgttcatttttctgttgggttttctgcttgttgatttaaagttttcatatgagagtaatttgttgtatatatgtattgcaaatatctttttccactctgggagttgtctcttaaatatctgaatggtgtattcagatgaagcaacagtttttttttctttttttagtttgtattttgggttcgagggtacatgtgaaagtatgttacataggtaaacacatgaacaagggtttgttgtacagattatttcaccactcatgtattaaacccagtacctaatagttagcttttctgctgctctccctcttcccattcttccccctaaagtagacccgagtgtctgctgtttccttgtttgtgttcacaagttcttatcatctcacttataagtgagaacatgcagtattccgttttctgttcttgcattactttgctaaggatgatagcctccagctccatccatgttcccacaaaagacatgacctcattcttttttacagctgcataatattccatggcatacatttaccacgttttctttatccaatctgtcattgatgggcatttaggttaattccatgtctttactattgtgaatagtgttgcagtgaatattcatgtgcatttgtctttaagacagaatgatttatattccttttggtatatacccagtaatgggattgctgggtcaaatggtagttctgcttttagctctttgaggaatcaccatgctgtgttccacaatggttgaactaatttaccctcccagcaacagtatatataagtgttccttttttctgcaacctcatcagcatctgttattttgtgactgtttaataattaccattctgactggtgtaagatggtatctcattttgattggcatttctctaatgaccagtcacattgagctttttttcatatgcttcttggctgcatgtatgtcttcttttgagaagtgactggtatgtcctttgcccacttttaatggagttgtttttctcttgtaaatttgtttaaattccttatagatgctagatactagacctttgtcagatgtatagtttgcagatattttctcccatactgtaggttgtctgtttactctgttgatagtttcttttgctgtgcagaagctcttcagtttaattagatcccacttggcaatttttgtttttgttgtgattgcttttgatgtcattgtcatgaaatctttgccagttcctatgtccaggatggtattgcctaggttgtcttccagggtttttatagtctttgcttttacatttaagtctttaatccatcttgggttgatttttgttgatggtataaggaagggatccagcttcaatcttctacatatggctagcaagttatcgcagcacaatttatcgaatagggactctactccccattgcttgtttttgtcagctttgtcaaagatcagatggttgtaggtgtacggccttatttctgggctctatattctggtccattggtcaaagcacctgtttttgtaccagtcctatgctatttggttactgtagtcctgtaggataatttgaagttgggtaatgtgatgcttccagctttgctctttttgcttaagattgccttggccattcgggctattttttggttccatatgaattttaaaagattgttttctagttctctgaagaatgtcattcgtagtttgataggaatagcgttgaatctgtaaattgctttgggcagtatagccatttgaatgatactgattcttcctatccatgagcatgggatgtttttccattaatttgtttcttctctcatttctttgagcagtgttttataattctcatcatagagatcctccacctccctggttaaaggtattcctagatattttaattctttttgtggcagttgtaaatgggactgcctttctgatttggctctcaatttggctattattggtgtataagaatgctagtgatttttgtacattgattttatatcctgaaactttgctgaagttgtttatcagctgaaggagattttggctgagactatggagttttctagatatagaatcatatcatctgcaaacagatagtttgacttcctcttttcctatttggatgccgtttattttgttcccttgtctgattgctctggctaggacttccaatactatgttgaatagaaacggtgagagagggcatccttgtcttgtgctggtttttaatgagaatgcttccagcttttgcccattcagtaaaatgttgctgtgggtttgtcatagatggctcttattatttggagatatgttccttcaatacctagtttattgcaggtttttaacatgaaggggtgttgaagtttatcaaaacccttttctgtgtctattgagataatcatgtgttttttctttttagttctgtttatgtgatgaatcacatttattgatttgcatgtgttgaaccaaccttacatcccagggatgaagcctactttatcatggtagattcgctttttgaagtactgctggattcagtttgcaagtattttgttgaggatgtttgcatcaatgttcaccaaggatattgtcctgaaagtttccttttctgtgtatgtgcctgtgccaggttttggtatcaagatgatgctggcctcacagaatgagctggggaggagtctctcctcctcaattttttggaatagtttctataggaattgtaccagctcttctttgtatatctggtagaatttggctgtgaatccatcaggtcctgggctttattgttgttgttattgatatgctatttacaactgattcaatttcagagtttgttattggtttgttcatggaatcaatatcttcctggctcagtcttggcaggatgaatgtgtccaggaatttattcatctcttctaggctttctactttgtgtatatagagtatatagaggtgttcgtagtagtttatgttggttgtttttctttgaagaaacaattttaattttagtgtatcccaattttttctcttatagttaatactttctatgtctttgcctactccagagtcatgaagatgttctcttttcctttaaaaactttattattttttctttaacatttagatttgcaatccttctggaattgacatacagtgaaggtaaagatcaagataatttgtccaatatgtatattcaagcaacttactccattcattgaaattactatccttttaccactttgtcgtaagttacctttgtcagtattgtcataaatcaggtgaatatatgtatgtcggtgtgtgtgtgtgtttggactcttccttctgttccattggtcaggttacttttccttgggccaaaaccagactgtcttaattaatagagcctcataatatgctgtgatgtctcttagtgtaagtcctgcatcttcattgttcttcagaattgccctggctattcttggttcctttaccttttatatacatttcagaatcatgttgtcagtttccaaaaagtaaacctgccaggactttggttaagattgcattgaatctacagattaattggggagaataaataagttagttttgtaatatgaaaatgcaaagtaattttgagcatagggtgaccacatgctccattttacctggggcagtcccagtttaatctgttgactgggcattttgttcaatttagcattttccctgggaaaagtgttatttatctgattagtcatttgactagcctgtgtaagtttgattattttattacaagtacaatataaatttattgcctaagaaaacagttgtctttgggaataagttatcctaaattaaaatttctcaaatatttctaaatgtcagttttggaaaaattatccttacatatacttgattttctaaatacatattgtcagcaaacctttcaggaggagttaggaagaataccctattgtgatgtttggaataaaaaattttcttagagagaaaggaattagtagggaagttgtctacaatcaaggatgaagtccaaacgagatcatggcacatttaatttagttccaggtatgtgttgggaaccaagtgaaaattactgcaaggaggcagaatggaatgtggaaaacagaaaacggaaggaagcagagaggcagtgtgatgtttactcaaagaaattctgcaaattagagaatgagagctgggcttagctcctgagaattttatatgggactctagcttcccagccatgatgtgggtcaggaggccccatcctgccagccctctgggactcctgtgccttagagatgagagggaagcatctatgatctgagaagagggttctgggacaaacagcctggacttttgtgtcttttctaggggctaaggagaccctggaagtactgctgttcattctctaacatgaagcaatcaaatgctctttccacatcttgttggtggcagggtaaagtctgttggtggctgcctagtagagtctcagactagaaaagaacctactctcaaatagcggcaatctttagcgcagtggttctcaacattggctgcccattagaatcacctgggaaggtttatgctcctaggcccagctgccgcaaccacttaccctctcctccaaccccagcagcagaccaattaaatcagaatctctagagatgggaatctggcatcaatatttttaaaaactgtcctaggtacttaaaaattatttctttaatgaataaaaaaatatataaacatcatattttaatatatgggtacattgtggaatggctaacttaaggtaagtaacatatcaattacctcacacactcatcatttttttgtgcccaggtactttcaagacccaatcgggttagaaccatggagtcatccctgacactagtctctccctctgcccccaggcccagctaatccaccagcaagacatgtggatgggatgtttcttctccaagtgtttggaattcatccactttttccactgctgtcacaatcaccctccaggtccaggtgccattttctcttgcctggaaaattgtaatagtcctgaacttgtccacatccacatgacaccctctctactctgcaccctgtttttgaatccagttgtgatttttttcacagctgaaatctgatcatatcaggcccccagtttaaggcacttctgcactttccctagactgacagctcacattgcctgcaaaggcctgcatgaccaaccaggccctgctctgctctgcagctttatttcacatctcattctgccctgctctctctgctctagatgaactgggctgcttttagtttgtcacatctgccatctttcgtcttgcttccggacctgtgcacataggatctcctttgcctgcagtgtttttccctctactgctcttcattctttagctcttggtttcatcatcatcacatcttgtctgactgccctgaccaaggcaacccctgttacagcactgtgttttttagaatactggttatagctgcatttgatctataccagaggaaaaaagaacatcaacttcttgttaatgaaattgatgaaattgtaggtaaatataatcaatttaagagctcagccccaatacgtttatgtatttcaacccttggcaagtctgtgttgtttaaccagaactctgtgaaaatcatatgcatgtttaaaaggctagaaataaacatgaatgattattatgtatcaattataaatgaaaaagaccagaagtaaacatgtaatgtttgtggttcacctttttttgttgttgttatgcacatgtaacaaactgtggttcactttggtaggaatatggaagatttttctccaatcttttttatgttgtttgtattttccaaaatttctagaatgataaaaattatttttataataaataaaaatgcaataatttcaaaaatgtgtctagatggactacatggaaattatgactggaaataatactaagctatgtaatgtgttctctttgactctacctgtactttcccacaaaacaaaatccagagaataccattcttgtttgtaaacttgtaaagatgacatgagaattcaaagaactgaaaatattacttctttgatggatgggtctgtcttgtaggaatccatccattcaattgcctatgttgccttccacccctagaatgttccatagcaggtagagctcggtcccacctcccaggaagactcagctgttgacttgctggagtgcttcctggaccctcttagaaaagtgtttatggttacattccagccctggcagtcgtagtgggaggaacagagctgcgagatctgcccttgcccaggtttttatgttggttatgttttgcagtttgctgtcttgtgctctgctgctgtttcatgctgcacagcagtgccatgcagggcagatggagaatggaatctagacttcctcatataaagaagactatggagcccagccaataaagattgttctttctcatagctagaggtataccgtatacacattttggttgaataccaaaagctaagtgttaaaatcaatatttgactaagaataaagcccaattctatgattaaaaaaaacctcttgacagggaggctgaggtgggcagatcacttgaggtcaggtgtttgagaccagcccagacaacatggtgaagccgtctctactaaaaatacaaaaattagccgggcatggtggcacatgcctgtaattccagctactcatgaggctgaggcgggagaattgcttgaacccaggaggcagaggttgcagtgtgccgagatcgtgccactgcctgccagcctgggcagcggagcaagcatccatcccaaaaagaaaaaaaaaaaaaaacctcttgatataaggaagtaaaacttgtattatgagttaagtattacttaattatctctttgaggtaataatttatttagaggtagcaaagctggtcttttgcttttaattcatctttaaaagatgagaataattctcaaatagattccttttttcctagaaaagttaatgccatcatgaaattaaaaaatatagtgcttaagtatttatttattatcattacaaatattagttatagtataatctgatttccatcctaatagtatttgtttatagatatgtgtatttcaaagtatgtatatgttttgtccatagttatttagctagtgctacatttagctgtcaatttatttttctatttaactaattaagaatttttgtaattgttttttcatgaaattaatagctttcatgttaattattgtgacattttatgtttgtaagaagaaatatttttccttctactgatagagtctcaatgtcataagcataaattagtactttcaattctagttttatctgaaatacacatatacaattgatattcttgcattaaaaataaaatccattccttgttctcattattgacatcattacgctatttgtatatgatcataacttgagatactttgatgatcaagtatgccagaaaagatactgatttacatagacattaaacagttgggtcttctgaaggccaggaacaaattaactatcagcttttggctgaagctgaactgtagctgaattaatcatagcacttattttattttgtcaaagatttatggagaaccttctaagtgctagacatctgattggctttggatctacaataataagtgagaataaagtaaacttatcttctttacatttaggtaacataaatgtcccagcctgtttgcccatcatattacctaattcaaaaaatagttcaaatatctcccctactagctgcaagaattccaatgttttatcagttttcccgccctgaacattttttgagcccctgagatatcccaagccagttgttgttcaacatcttaaccagctgtgtagctttggaccactgccttccttgttgttggtcacgagcatccctcagcccattgctcctactctcccatatatggctttcaccccagatgccatcccagactcttgcacaattcccccactaataggaagaccaactgtgatgtttgcatgacttcacagttatggtttgaagatttttttaaaaggtgcgggatgttatacaagaggataattcaacaattgtaaatagatatgggggttccctgagttcatggactaaaaccctccttaggtgttttgtattgtgcaaagtcttctctgcccagtctcaggcctgtcaccccatttcaagggtcagcttacccttccacagcaggaatgcctggaacaagattcacatgtctagatcctaggcctcctgttccctcaggcccagagacagtcatagtctcatacctctcagtgtccatttcctgccccctgtcaatcttctggtaagactgacagtgaaaacatctcttccttctcgcacccatccacagaggtgtgatctttctctttagttcttaggataattcagaacaacatcactgctttctccaaagttgggtttattcaatcaggaatgaccccaaatatgaggttcatgcaatatagtccagtttgagcttcaacagttccaggctgttctttcagaggtaagatgtggtcatgttcttgcagcttccagtctccactgatctcctgtagttaactgcttgaacacattcatctcccagtatctaacaaaaactttcagggacgatacaatttaaatccacttgcaggaaagaaatattttatgaaagaaaagataatttgcagagaagcagctgtgtcacagtgaagacaacctttcatatgattgtggaaagcagtttaagttccttggagctatattatctccagagtctccattacagaatagagtctatgctttaccttcacataatacgaagatcctctaagatgctttttccaaaataaagaagcagtgtgcctccaaagctgagttcaaaatttttccccaagggaaacaaactgctagaaacatttaaatgtcagtttttctgactcagccattgatgtcaaataatcccaatctcttgggattcacactagaccagagcaccccaattaaaatctatttcactagcactcaataaagtgccagtaagtacttggggaaaaaaatgagaccaatgaactgtctagtgaaatcaattgctaaggaataatttcattccaatgtaagaagttcaaagtattttggggactgttatgcagagagttctccacagtcactttcctaaacaatgagtagcagaaggattgcctcttctggtttattacaagctttttattttttaaggttcttaattttatacatttcttttaccatagggccaagtatagcatattgtctataatcagtgtttaataaatgattagttgaattggatcaaatatagccttccatatctgaatcctattatgaaatataccaaaacattcaatgaaatgaaccctctctactgaccttttagttttctctgaaactctattttggggaaaggaattgtgtataatctggtactcagaactcaactttttgcctccctttgcagcagaagatcaggaggcagtacaaggcatttcaacatagttaaatgggtaaaaagcaatgccagagccctatatcttctccatctatgtgttttaatcttcagaaagtattccccaaactttcccacaatacccagtgttccatttcctgagaaagttggttgcaggaaagggctaatgtcacatggatgctgacacaatatacccatgttttgtcagaatttgaactttaagccttatttttaattacaagatgaaagactgtcctaaacagttgggattttagtttgcagatgagtgatgatactttttccttggggagcacaccgttattaccattcctgatctcaaaatgcaaacagctgtgggcttagcccacatacaagctaaaataattagaaaacattgaccttggccgggtgcggtggctcacacttgtaatcccagcactttgggaggctgaggcaggtggatcacaaggtcaggagatcaagaccatcctggccaacgttgaaaccctgtctctactaagaatacaaaaattagctgggcgtggtggtgtgcccctgtagtcccagttactcaggaggctgaggaaggagaattgcttgaacccaggaggcagaggttgcaatgagccaagatggcaccactacactccagcctgggcgacagagcgagactccatcttaaaacaaacaaaaaaaagaaaacattgaccttggttactgtgttcacaaccagtgctacacacgtatacacccatgcccataccacacacatattacacatgccacatataccacacacacacaccctccactatacccacatatcccctacactccccgtacatcccacacacagaccacacacacactacatatactacataccccatgcacaccacattcatacacatcacagtcacatataccatacacaaaccacacacatatcacacacactccacacctatacacccccgcacataccacacacaccccacacgcaaaccacacatcacatgtaccacagaccacaaacacataaagcacatatacacacacatcacactcacctcccatcccgctcaccttaaaccctcccacacaaatacagccattcatttattcagccaacatttattaagtgcctattttatacaaaacacaatcttagatgctgaggatacaaagatgaataaaacatagtttttatactcaaggagcttgaaaactagcaagggaggaaaatgtatacctttccaaagaatttattgtagtttattgtaatttcttgttttctcctctgtatttctcattggattgtttggtcccctgagacatctccttgaccgtgttcactgttttctccctggcgtcttgccctctgcctacctattctgtaacaatatactgaaatgagtgagtcaataagtaaaaccatatatatgtcataaaactatataaataattaaaccaataatataagaattgtgtgttgtgctaactttgtgaacacaatgcctcaggagtgcagaggtgagaagagactcgagcgagggagcatcacgaggacatcaggaaaagtggggaggaaggaaactgccatcttggaattggcaattagaagtgtttatagtgactttgcaaagacaagcactacctgtggaaaggagttgcaagccaagttgttaggggttaaggaatgaatgggaagtggataaaaccgattgacttgagttgaggaatgagccttttcacacttacatagaagggaggcagtttcttgttctccatctgatgtggccactcttgagtcaaagaatgtattgctgtacatatgcaacagagatgtctttacctctggatcagtttcctttttttttcaaattattatagaaaacaattggataacaatgcaggtcagggaaaatcctagggaaagttgtaacattggaaaatttcctgacggattgcatcctagtgatttaaaatcactcctgtggaaattccctgactgtccagtttgaattcatcagctctttcctccaaaagcagcaactcaaggaccaacattttctcattcttttgcctgcactaaaatgtcttattctcttatgaatgttaagttgttggtcatctaatctggtaaaataatacaaaaaaaagcatagagtttttggttcagttgtcctgacttttcttacactcattcctggcagtccaaagcacagtgctgcccactgctctgtttaaaatcagacacccccgaaggtccttctctcccactcaagtgaaacatgtaattaagatagtctgatgaaaaaatttaaaatagaaagtgagatttttctctcttcttccatttaaactcactgttagtttccccttagcaagaaagctgacattataaatgttatcacattcacacatattataagcctagaaattatatcatctcaggccaaaagtggatgctgagactctgatatcttgcctctctgccacctctaggtcattttcccaagacctctgcagctaaatatactttggttgcaagtggctgttaacagaagctgatcttatttttcccctgagaaagagggaagtgtgaagccagaactaggactaataaattgggatttggtgaacagaatgcataccccacccccaggcattgggtcttttctagagtggcccatgaatgcggtgttggaggtttgggagaccacttgtgagaataactcttggagaaggtaaaatagggttgaaaagttatggaggatgctggtactctgaagaggttacagaattctagaagagccatttattttttatggaagatatctttcttcctacttaaaatatgtatatttaaataaatcaaaagtagaataatttccaggataaatggcaatcataaaagcacaggtaacatggctttatttttaataaggtaatgcaaacaaaaaagtcataggaacattataatgtgtgtcttgtgtctatgaaataccgtgtgttaatctgcaatatggacaagcctgggcacctccaggttaaattttcagatgaaagtgtcaacagttctcctctgagtcaaggatcttgcttccttgagttgaaatataagcttaggtttcaatgattgagtacgatggtgcctggcctcgttctgcaaggttaaacgttattggcttttcttatgtttcacagtggattagttttctagatagtgcaaaatgttagtaatgagcttattttaaaaatcacttacttatttcaactaattcttatgatatgttttaatattttaagagaagatatagatatttgaacataactaatatggcactgatattttcttaaggtgtatgagaaaagtgactttgtgataacataatatcttaggtttaaagaataaaagcaaaaatatttatgtgcagttcaaaccccatttcaattatagctgaattattttctgtagcttagctacaggaactgcttaaacctgatttctgcatagtttgagcagattttaaggcaggagctaaaaggaatagattgacttggaaaattttgtgtatgagagttctttaaaatggcattatcaggttaaagtattaaaagggacaagtaggttttgcatatcaaaattaacagtgttcagacaaccttcacaattggatgtatgggtataaacaaggagattttttggcatactatacattagaatcaatatctggttttatggtcataccttttccgaattttaaacatcctgcttgtgaacactccagatagggtcttgtctctagtagctccttccttttcttagagctctgagacaacttggatcaaaaggactgttgaaagccaataccttgcattccccctgagtttgttctataagaagtcccttacaagccatgatccttccttcatataaacccctcatctcttatggcacagcactgccacctcagccattctttcccacacatacccctttcccttaatttttgccaaattcccctcccctttctttttgggaagtgtctttttatttattcgaattgtaaaccaaaatattgttataatcccactgataattttgaaaatgctggtattcctggtattaactaaaatgaaaaattacataaaatggcactgaaaaaaataaaatggcaaggcaatcttcatcaaccaagggtctcaaagtactgaaaatccctttcgaatcttcccttagtttataatctacgtctgtactcttatctaaacaaacgaagaaaacatcaacacttaaaaatataaaaaattatttcttattctatttcattccttttcaattaccagtttactaaaattttatattattttgtatttcagatgttctacatttcaactccatcaaatattaaattgatgtttatgggctaacctggaaaccgaaaaacagtttgtttcactacaagaataagaaaatatgtccaaattcctgtcagctgacttataaagggacttttagaacacaacccaatgtaagttgcaggcatacagtattttgttctttgttacctgccctgcagttaaggcatgtatctgtttgtatatgcccaggtgtatgctgattgtatatatatttgtgtctacacatgaatattttcacaattccagattcatgacatcatttattcctttcttcaataaaatttgaatgcctattatgtaacaggtgcagttgtaggcctaagggatatccagagacgaggtgactgtcctcatagagctcatactgtaatggggagacagacataagccaagtaattgcacaattgcctaagaaatgcatactctgataggtgtcacatagcactatgtgagcatataaccagatcttgccttgtgtccagggtcagaaagggtttcatgaggaaggtaatttgccagctgagatctcatgggtgggaagttaagagagtaaagagggtgggaggtgatgggaagaggggcaaggatggggtataaagtgctccaggtgaaaggaacttctgttcaaaaacccccaggcacaaggaactcacattcaaagaccatacttgcttacttaggtacttttgatgattttttttctagtagtaaccactgggtagctgggcaacttttagcttaaacaaacccttaaagattaattgtaatcatactagaaaataaggcatatatcatttcagaagcacttgtacttgttttgtttttcaggcatgaggtactccttaagccctgacaaccatcttgaagatggaatcatgaatatggcaaattttctacggggctttgaagaaaaggggataaagaacgacaggcctgaggaccagttgagcaaagagaaaaagaaaattcttttctccttctgtgaggtgtgcaacatccagctgaactctgcagcccaggctcaggtgcattccaacggcaaatcccaccgcaaacgagtgaagcagctgagtgatgggcagcccccaccacccgcccaggccagccccagcagcaacagcagcacaggtaggaggcagggtcccgggttccatgtgctgcggggagagatggtcctggtctggaaaatgaaggatttagaacaagacttaatttttaccttaaaactgggctaccatgataacatgtactctttctcctacaggtaaaatacatgagctgtttgtcacctctcgaaatatttgttacacccactgacatacacactggcacacacacatacacacatatgcacaatttgtatatgggtccagagacttcctgtatccccacaatgtgtgaacacttctgaatgtattttgaaatgtgtttaaaatgcatcagtgatgtcattttttccctctcttaaaattagctttcctgggtttcctttatctgctttctattgggtggcataccacttgatagtatataaaaagctacagctttatttataacatcctgtgatgcaggagaggagcattaatcttgcatgttaaacttgtcatattcttttagagagttgccagcagtgtgctgggtgttctaacaataggaacaggcattgccaaaaccaacaaggcttccctctgaaatccagcaccatcatccatcgctttcacttgcctctcaccctttccttgtgggctggatagaagcagaagctcaggaatttttgcatttctgcctctgccctgaattctaaacaatctttcaaatcctttatcttatccttgggcagcccctcctcttccacattgctggtcactgggtatcttcactgtgacagaattaaagaaaaatgtgaaatttattgttatccatggtgaagatttctacaaaagacagtcttcctcccaaggtttgaggtgggaggccaagataagcctcctcccaaatgtgggggaagagctccaaattctactctagcaagggtttgctctgtaatgaggccccagcttgaagtgagatgatacagagaaaacatttgttggaatttcactcagtgctgttacatggttcttggtgtgttgtaaataaattatttttatatttcaagccaaatctaactactttttactcagttgatgatttaatttcattaaattgttttcttaagtcaatatttaacatgctgtgaaagaaagtaaaggggcttacagcatttaaggtacacacttataatagtagaaaaattatttttccattttctatttattataattattccaaggtgtattcatttacctatagttatatattaaaaatatagttaatgttatggccgggcgcagtggctcacgcctgtaatcccagcactttgggaggccaaggcaggcagatcgcttgaggtcaggagttcaagaccctcctgggcaacatggtgaaaccctgtatctactaaaattacaaaatttagtcaggtgtggtggcacacacctgtaatcccagctactcaggagtctgaggcaggaaaatcacttgaacccaggaggtagaggttgcattgagctgagatcacgccactgtgctccagcctgagcaatagagcgagactccatctcaaaaagcaaaatatatatataaaatatataatattatattattaataatattatatatatatttagtgttaggttcaaaactgatacctaagttagagcacacatagcctgagtaaaagtttgaattacatctgttatggtgtaaatgtctataaataccatagtcattaaaaattatatttctgaagaatatctcatgatagaggaaattgtccaggatataatgctaagtgaaacagcaggaactaaagcggaatatacctagtgctatcatgtgtgcatgcgtacactatctactgtttagagcctccactgaatgaggttcaagcctgacatcatttcattttttttggtcactttcctcacttttgatctatcaaatttgtgtttcctgctgggtagcaactctcttaacactctctcaactcataacttctcacttttgtgtattcagaaagattctttgatttagaagattcggttctatttataaaaacatcattttattgccaaattaagatttgtctagatggactctagaacttagagtggagggctgggcacatgagcttctaccctccccctgcctcagcctgctcttcagcctagtggtgggaaaccatagaaggatagaaaggcggaggtttaccttaccttacagcctctgcaaggtggcaatgctgttcttaattgatgactactattttggctgtctctgtgggacatacatcgtcttaacagaccctgtggatgaagggatcccccagattgtcccttaggcattgagagtcccttgtgagatagctgcatcttccagcttactcatagttgttagcagaagccttcattccttgactgtatgtgcctctttcttccacactgtgttagtcctggcaagattgtgtcgtctgttctcatatgcctcaatgctgggggattgaggtcagaatccatctgagaatgaacattcctcttgaaaacctggaactgctggggcccaggcaagtacaggtggagtggactgcggggggcttttctttcctgctcaggtaacacaggggaggctggcaagcccactgacaaagcaagcgcctaaataagaaacaaaatgccagtcttccttttttgcccatcacttggcttcagagaatattgtgggttgaattgtgtttcttcacacacacacaaaaaaatatattggaattctaacccccagtacctcagaatatgaccttatttagagctagggtctttacagaggtaattaagttaaaatgaagtcattaggatgggctgtaatccaatatgactgataaccttacaaaaaaacggaaattcggacacagagacagatatgcacagagagggaagatgatgtgagaagagatacagggagaagacagccatctacaagccaaggagagagccctagaatagatccttccctcacagccctcagaaggaaccaacccaagtaacacattgattttttatacttctagcctctagaactataagatgataaatttctgtagtgtaagccactagtttatagtactttgttacaacagccccagagaacaaacacagggaagaaaatcgaagcccatttcatgcccacagagaaaaatatgtggtagtagatgttcttcccaagaactgttaatttaagaggtgacttcccctcttctgggtcggttttgtagtgttggagttggcatcgatgggaattgggtccacagggtgatggttgagacttgtttctagtaataaaaggtggctgacccctaaccactggaagttcttctgccaaatttagtattcagggtatttacagaacttttagatctgagctttagaacaacaggaagattcttagagtgtacctgaaaccagtctgctgtgtgtgtgtgtgtgtgtgtgtgtgtgtgtgtgtgatcaatgtaccaaagtgagcaagggacttgtgaaaagtagcagcaaaatccttttcccagcagtgtctccctagccaaatgttttatgaatactctgggcggtgaaagagagactcaaaggggaagcaaaaagagctgaggtaacttagtttgcatataaaagatccctaatgctttccccatccagttccaaggggtaagtggaaataacagaaaccgcagatgggtcttggcttccagaaaggaaaaagtagttgtgagtttctttgtctcacagggtccacaaaggcagtaagatcctggtgttcctggcccctagcaagggtgggcagatggacctgaggctgtctcataatttcttatgggtttagggagtacagaagctgctggttgaacctgggaaccacagggacatagtcttttctgttagactgggacagtggcaggacaatattttacatgtaccacagcaaagaaatacctcacagttcctgcatgaactaatgactaaatatcagacagaaataaacatgcctcagcagatgtccatgtgcagaagtgacagccaggccataaacactgctacctgagccctggaaccatgtaagcccataagtaccctcctcaacccaccccaaatctggatgcagctctggggaaagtcactccatactgcctgaaattaaatatctatcatcacatgagttggagtttgtactaggcagcataaattatcattagcaggtttatacttaaatattggctaaaggaaaattttcaactagaaaggaaatgaaaatgaatcttggagctttgagaaggaaagaagaaagaacaatggaaagaatagaaatatggtacataataaactacctgtagtagggttctccagagaagcagaaccagtaggagaaaggaattagctcacacaattatggaggcctccaattttcaagatctgtaggaaatctgaagacccaggacagccaatggtgttattccagcataagtccaaaaaacatgagattcagaagaattgatggtatagttctagtctgaggactggctggctcaagacccaagaggagctgatgtttcaatttgagtctgaaggcaggaaaagaaactaatgtcacaggtggaaggcagtgaggcaggaagaaatacgcagaataatgtgtaaccaaatatctgaacatccagtgacccagtcaagttgacacataaaattaatctttacattatcattttcttcatgagttttgtaaatcatatttgatgactgaaacaaaatataatcatctgatgctaaaaacagtgatatttgaaagtaggaaagttaaatgctgataccaataaattgtctgccataagtcacatgtgtatatcattataatattaatggcaaccactatgaaaactatacaaagagatacaaccaaaatataaataaataaagatggagtcctaaaaagtgttcaagtaaaccacaggacagaaagaagagagaaacagaggaccaagaagcaaaggaaaaaacagaaagcaaataataaaatgtcaaacttaaaggctaacatcaataattactttaagtgtaaatagcctaaataagccaatcaaaagaaaaaatgcattaaaaaaaaacccaactatatgctgcttacaagaaactcacttcaaaatcaataagaggtatgttgaaagtaaaaggatggaaaagaatatatcatgcaaacagtaatttaaaaaataaaggcaggggtagctatattaatatctgatgaagtagggagtaaagaaatttactagggacagagtaagacattatgtactgataagatattcaactcaccaggaagacctaatgatcctaaatgttcatgcaccagacaacagagcctcaaaatacatgaagcaaaaactgatagagcagaaaaaagaaatggataaatttacaattgcagttggggacctactctcagcaactgataggattattaaacaaaataagcaagaatatagaggatctgaacaatataatcaactaaaaggatctaattaatttatatagacctctactcaataacagtataacactattttttccaagtgcctatacagctattcacaaaggtagaccatatattggaccataacacaaaccttaatgcgtttgaaggaactgtaatcatatacaatattttctctgaccataatgaaatcaagtagaaattagtagtagaaaaacaacaggaaaattaaacaatatatctcttaaataatctatgaatcaaagaagaagtctcaaaggaaaaactagatgaaaattaaagcacaacatagtaaaatatgtgggatgaagctaaagcagtgctgagctggaaatttatagccttaaatgcttatatttgaaatgaaacaaagttctcaaataagtaagttcccgaccaagaagctagaaaagaatagataaaccaaaccacaagcaaatggaaggaagaaagtaataaagacctaaaccaacaatctgtgaagttgaaaataggaaagcaatagaggaaaagtccataaaacaaaaagcttattctttaagaaagaaaaatcaatgaaatttgtaagcttttagcaagactgatgagtacaagaagaaagaagaagataccaatgagatacatgatattatgacacaacttgcagcaattaaaaatataataagcaaatactaaaaacttgtgtttataaatttgacaagtgagaaggatgaaccagtccttcagaaaccataaataactaaaattcaactaaaataaaaatagactatctgggccaggtgtggcagctcacccctgtaatcccagcactttgggaggctgaggtgggcagatcacttgaggtcaggtgttgataccagcctggccaacatggtgaaactccacctctattaaaaatacaaaaatttacctagcatggtgacaagtgcctggattcccagctattctggaggttgagacaggagaatcgctggaacccaggaggcacaggttgtggtgagccaagattgtgccattgcactccagcctgggagacagagcaagactccatctcaaataaacataaacataaatttaaaagtagacaatctgaataggcctatagccatcaaataagctgaatttatcattacaaagcacttgaaaaacaaatttctggattcatatggtttcagtggagaattctaccaaggattttttaaactgacaccaattttatacagttgctttcagaaaatagaagaagaggaaacactgcccaacttattttatgaggctagtattatcctaatacccaaatcagacaacacattatttttagaaaccctacagaatagtatctcataaacttagagtaaaaaattatcaacaaaatgtgagcaaattgaatccagcaatgtatcaaaagaattatataccataactaagtgggatttattccaggtatgcaaaactggcttaccatttaaaaattaataatctaccacctgggcatggtggctcacacctgtaatcccagcactttgggaggctgaagtgggcatagcacctgaggtcagcagtttgagaccagcctggccaacgtggcaaaaccccgtctctactaaaaatattaaaaaattagctgggcatagtagtgagtgcctgtaatcccagctactcaggaggctgaggcaggagaatcacttgaacctgggaggtggaggttgcagtgagccgaaatcacgccactgcactccagcctgggcaacagagcaggactccatctctaaaaaccaaaacaaaaacaaaaaaatctaccatatcaacaagctaaagaagagaagtcacatgatcacatccattaatgcagtaaaaacatttgagaaaacccaacacacattttcagcaagctaggaatagagggaaactaccttgatttaaagaagcatctaaacaaagcctacaggtaacatcatacttaatggtgaaagaccgaatgtttttctcctaagaccaagagcaggggaaggatgtccactctcaattctcttattcaaaatggtgctggaagttctagccattataataaggcaagaaaaacaaataaaaataaaagcctgtaatcccagtactttgggagactgagaaaagaggatcacttgagcctaggagttcaagaccagcctgggcaacacaacctgtctctaaaaagcaaaaaaaaaaaaaaaaaaaagaaaagaaaaaaaatgttagccaggcatggtggtgcacacctgtagtcccagctactcaggaggctgtggtgggaggattgcttgggctcaagaggtcgaggctgcagtgagctgcaatcacaccactgtactccagactgcgtgacagagtgagaacctgtctcaaaaaaaaaaaatcaattgcatattatatttatatactaaaaatgaacatatggaaatcaaaattttaaaatgcaaataccatttataatcacttcctaataaaatgaaatacttatatactttaaaaaacatgtgtaggatctgtatgctgaaaattacaaaatgctgagaaaagaaatggaagacctaaataaatggagagacataccacgtgtttagaaatcaggattagaaaactcaacaagattaagatgccagttctccttaaactgatctataattttcatgcaatttctatcaaaatcccagcaagttctttttgtagacatagacaagattatgctaacatttatatgaaaaagcacagaccttttagctagtttagctactagctaaaacttgacaaagaagaaaaaaggagggatctctctacccaatattgaggcttactatatgttaaagtaatcaagacagtggttttattggagagagagagagagagatgaaaaagactagagaacccagacatagatccacacacacatactcaattgattttttgataaaggtacaaaagcaagtcaatggagaaagaataccttttcaacaaatggtcctggagtaattgaacagctataggcaacaaaacaaataaacttaggcctaaattctgacaccatataaaaatattaactcaaagtgaattatagatttaaatgtaaaaaacataaaaatttaaaacttctggtggctgccctagaattcctgggcctgtggctgcatcactccagtctctgcttgtgttttcacaacatcttctgctctgtgtgtctatgtcttttcttcagatctcctttctcctcatctcataaggatgcttgccgttgggtttagagctcacctgtataatcctggattgtttcctcatctcaagattcctagcaatcacatctgcaatgagcctttttgtaaaaaagatagcactcacgggttccaaggatttgacatgcatatcttttgggggtgacttgttaaattgtggtacatctgtactaaggaatactactcaacaataaaaaggaatgaacccttgatacatgcaacaacttggatggatcttcagggaattatactgagtggaaaaagccaatccccaaagtaacatactgtatgaattccatttatacaacatttctgaaatagcaaaattgtagaagtagaggacaaattagtggttggtaagggataggggtgagtttcaagaaggaagtagatatgggtacaaaactgcaacatgagagatccctggtgggggatacatgaatctacacaggtcatacacacacacacacacacacacacacacacacacgcacacaggaatccaggtaatactggagaaatctgaataagctttgtacatcagatcaatgtcaatatcctgattacactattattctatagctttaaaaaattttgagatcacgccactgcactccagcctgggtgacagagtgagactccgtctcaaaaaaaaaaaaaaaatttttactatgggtagaagctgggcaaggtgttcaagaaaactccataatttcttacaactgcatgtgaatctctgattatcttgataaaaatttcagttaaaatttataataatgatgaccacctaaaccccccagttttctagtagcataattagagataataggaaacagaacccttggggatttttcttattttaaatattaccaagttcctattttacagagattaacagaacaatgtcttaagtatcaagagaaaataaatatttaaataagtgaattgcaatatggtatgctaagaacaatgacagatctacatgtaacgtagatgtggcacagaaaaaggaatgattaactttatggaggtcaaggaaggcttctcagaggaggtgatctttgagatgagtactcaaagatgagtttcaaattattcaagaaaaaacattccaggtataggcaatggcaatgcagatgcatgtaggaacaaactataaatagtttcttattattggagtgaagtatgatttgggggaaaagaggaagatccctttgcaaaggtagaaaggaatcagaacaggaaaaagggttttctggtcctatgggaacagaggtacaggaaaaacagctgcaaagacatagataagaaagtcacaggcagctgctggaattcagagctaagttgtcctgagttctctctgtcattctggtttatgttaactaggagcctctgcatcaattccagacatctcacttaggtattgcttccccagggtaccacacaattgcagagcttattttccatgacccatccacagcttcccaagtccagataaaactgaccatattagttctctatgtagaactaatatagctagtgactgacatcctgctctctgctatccattctcatttaatattaaaattttaagactaaaaaaaagttagtcaagcaaagagaatggagaaaagtgatccaaagggaatgaagagaatgctcaaaatctcaacttgaggaaaagcttggtgtgtctaaaaagctgagatgtggctgaaactgagtaagacaattattaatagaaggaaacacaagagaagtttggaaaggtcggcagaagctttcagaaaaaattttaaaacaatgtttttttaattatgattctgtgggtcagaaatgtgggctgggctcagctaggtggttcttgtgccggactcattggtgcacacccgtggagctgcaggctgctacagagtaactgtcttagatggttttagatggcttcacacatgcatgtggcagttgctgctggctgtaggctggataattcttaccagtagacccctcttcaaggagattagaccaggctttgttacctagcagtcacagagcagtgttgcaagacagcaagaacagaagctgcaacttactgcattcttttggtcagagctagtcacaaggtgctatggtttgaatgtttgtgtctctctaaaattcatacattagaacttaaaccccaacgtgacagtattaagaggtggtgcctttgagaggtgattaggccatgagggtgccactattatgaatgggattagtgctcttataaaagaggcttcaagatctgcctgctccttctgctttttgaccaagttgaggacacagtgttggtttcctctggaggatgcagcaacaaggcgtcatcttggaaggagagagcaagcacttaccagtcaccaaatctgctgataccttgatcttggacttcttagccttcataactgtgagaaataaatttctattatttaaaaatcacctcagtctgtggtattctgttatagcagcaggaatggcctaagacacaatgccagctcaaattagaggggtggaaaaatagaccctgccttgtgattcaagaagtggcatcttttatttggccttagaaattttaaactagcaagatggccaaataggaacagctccactctatagctcccagcgtgagtgatgcagaagatgggtgatttctgcatttccaactgaggtacggggttaatctcactggggcttgttggacagtgggtgcgggacagtgagtgcagcccaccgagcgtgagccaaagcagggtgaggcatcgcctcacctgggaagcacaaggggtcagggaattccctttcctagccaagggaaactgtgacagatggcacctggaaaattgggtcactcccaccctaatactgtgcttttccaacagtcttagcaaacggcacaccaggagattatatcccgcacctggcttggagggtcccacgcccacggagcctcgctcattgctagcacagcagtctgagatcaaactgcaaggtggcagcaagactgggggaggggcgccttccaatgctgaggcttaagtaggtaaacaaagtggccaggaagcttgaactgggtggagcccgctgcagttcaaggaggcctgcatgcctctgtagactccacctctgggggcagggcatagccaaacaaaaggcagcagaaacctctgcagacttaaatgtccctgtctgacagctttgaagagactagtggttctcccagcatggagtttgagacctgagaacgggcagactgcctcctcaagtgggtccctgaccccgagtagcctaactgggaggcaccccccagtaggggcagactgacacctcacacagctgggtacccctctgagacaaagcttccagaggaacgatcaggcagcaacatttgctgttcagcagtattcactgttctgcagcctccgctgctgatacccaggcaaacagggtctggagtggacctccagcaaactccaacagacctgcagctgagggtcctgactgttagaaggaaaactaacaaacagaaaggacatccacaccaaaaccccatctgtacgtcaccatcatcaaagaccaaaggtagataaaaccacaaagatggggataaaacagagcagaaaagctgaaaattctaaaaatcagagcacctctccccctccaaaggaacacagctccttgccagcaacagaacaaagctggacagagaatgacgttgatgagttgagagaaaaaggcttcaggtggtcaaacttctcggagctaaaggagaaagttcaaacccattgtaaagaagctaaaaaccttgaaaaaagattacacaaatggctaactagaataaccagtgtagagaagtccttaaatgacctgatggagctgaaaaccatggcatgagaactgcacaagcctcactagccgattcgatcaactggaagaaagggtatcagtcattgaagatcaaatgaatgaaatgaagtgagaagtgtagagaaaaaagagtaaaaagaaacaaacaaagcctcgaaggtatatgggactaggtgaaaagaccaaatctacgtttgattggtgtacctgaaagtgatggggagaatggaagcaagttggaaaacactcttcaggatattatccaggagaacttccccaacctagcaaggcaggccaacattcaaattcaggaaatacagagaatgccacaaagatactccttgagaagagcaactccaagacacataattgtcacattcaccaaagttgaaatgaaggaaaaaatgttaagggcagccagagagaaaggtcgggttacccacaaaggaagcccatcagactaacagcggatctcttggcagaaactctacaagccagaagagagtgggtgccaatatttgacattcttaaagaaaagaattttcaacccagaatttcatatccagccaaactaagcttcataagtgaaggagaaataaaatcctttacagacaagcaaatgctgagagattttgtcaccaccaggcctgccctaaaagagctcctgaaggaagcactaaacatggaaaggaacaacgggtaccagccactacaaaaacatgccaaattgtaaagaccattgaggctaggaagaaactgcaaaaacatgccaaattgtaaagaccactgaggctgggaagaaactgcatcaactaatgagcaaaataaccagctaacatcataatgacaggatcaaattcacacataacaatattaaccttaaatgtaaatgggctaaatgctccaattaaaagacacagactagcaaattggataaagattcaagacctatcagtgtgctgtattcaggagacccatctcacgtgcagagacacacataggctcaaaataaagggatggaggaagatctaccaagcaaatggaaaacagaaaaaggcaggggttgcaatcctagtctccgataaaacagactttaaaccaacaaagatcaaaagagacatagaaggccattacataatggtaaagggatcaattcaacaagaagagctaactctcctaaatatatatgcacccaatacaggagcacccacattcataaagcaagtccttagagacctacaaagagacttagactcccacaaaataataatgagagactttaacaccccactgtcaacattagacacatcaatgagacagaaggttaacaaggatatccaggactttggctcagctctgcaccaagcagacctaatagacatctacagaactctcctccccaaatcaacagaatatacattcttctcagcaccacattgcacttattccaaaattgaccacatagttggaagtaaagcactcctcagcaaatgtaaaagaacagaaattataacaaactgtctctcagaccacagtgcaatcaaactagaattcaggattaagaaactcactcaaaactactcaactacatggaaactgaacaacctgctcctgaatgactactgggtacataatgaaatgaaggcagaaataaagatgttctttgaaaccaatgagaacaaagacacaacataccagaatctctgggacacatttaaagcagtgtgtagagggaaatttatagcactaaatgcccacaagagaaagcaggaaacatctaaaattgacaccctaacatcacaatcgaaagaactagagaagcaagagcaaacacattcaaaagctagcagaaggcaagaaataagtaagatcagagcagaagtgaaggagatagagacacaaaaaacccttcaaaaaaccaatgaatccaagagctggttttttgaaaagatcaacaaaattgatagaccactagcaagactaataaagaagaaaagagagaagaatcaaatagacataataaaaaatgataaaggggatatcaccaccgatcccaaagaaatacaaactaccatcagagaatactataaacacctgtatgcaaataaactagaaaatctagaagaaatggataaattcctggacacatacaccctcccaagactaaaccaggaagaagttcaatctctgaagagaccaataacaggctctgaaattgaggcaatatttaatagcctatcaaccaaaaaaagtccaggacagatggatttacagccaaattctaccagaggtacaaggaggaactggtaccattccttctgaaattattccaatcaatagaaaaagagggaatcctccctaactcattttatgaggacagcattatcctgacagcaaagcctggtagaggcacagcaaaaaagagaattttagaccaatatccctgatgaatatcaatgcaaaaatcctcaataaaatactggcacaccgaattcagcagcacatcaaaaagcttatccaccatgatcaactgggcttcatccctgggatgcaaggctggttcaacatatgcaaatcaataaatgtaatacagcatataaacagaaccaaagacaaaaaccacatgattatcccagtagatgcagaaaaggcctttgacaaaattcgacagcccttcatgctaaaaactctcaataaattaggtattgatgggacgtatctgaaaataataagagctatttatgacaaacccacagccaatatcatactgaatgggcaaaaactggaagcattccctttgaaaactggcacaagacagggatgccctctctcaccactcctattcaacacagtgttggaagttctggccagggaaatcaggcaggagaaagaaataaagagtattcaattaggaaaagaggaagtcaaattgtccctgtttgcagatgacatgattgtgtctttagaaaaccccatcgtctcagcccaaaatctccttaagctgataagcatcttcagcaaagtctcaggatataaaatcaatgtgcaaaaatcgcaagcattcttatacaccaataacagacagagagccaaatcatgagtgaactcccatttacaattgcttcaaagaaaataaaattcctaggaatccatcttagaagggatgtgaaggacctcttcaaggagaactacaaaccactgctcaacgaaatgaaagaggaaacaaacaaatggaagaattccatggtcatggataggaataataaatatcgtgacaatggccataaagcccaaggtaatttatagatttaatgctatccctatcaagctaccagtgactttcttcacagaattggaaaaaactactttaaagttcatatggaaccaaaaaagagcccacattgccaagacaatcctaagccaaaagagcaaagctggaggcatcacgctacctgacttcaaactatactacaaggccacagtaaccaaaacagcatggtactggtaccaaaacagagatatatatagaccaatggaacagaacagagccctcagaaataatacaacacatttacaactatctgatctttgacaaacctgacaaaaacaagaaatggggaaatgattccctatttaacaaatggtgctgggcaaattggctaaccatatgtagaaagctgaaactagatcccttccttacaccttatacaaaaattaattcaagatagattaaagacttaaatgttagacctaaaaccataaaaaccctagaagaaaacctaggcaataccattcaggacataggcttgggcaaagacttcatgactaaaacaccaaaagcaatggcaacaaaagccagaattgacaaatgggatctaattaaactaaagagcttctgcacagcaaaagaaactaccatcagagtgaataggcaacccacagaatgggagaaaatttttgcaatctactcatctgacaaagggctaatatccagaatctacaaagaactcccaacaaatttacaagaaaaaaacaaacaaccccatcacaaagtgggtgaagtatatgaacagacacttctcaaaagaagacaattatgcagccagacaaatgaaaaaatgctcatcatcactggacatcagagaaatgcaaatcaaaaccacaatgagataccatctcacaccagttagaatggcgatcattaaaaagtcaggaaacaacaggtgctggagaggatgtggagaaacaggaacacttttacactgttggtgggactgtaaactagttcaaccattgtggaagatagtgtggcaattcctcaaggatctagaactagaaataccatttgacccagctatcccattactgggtatatacccaaaggattataaatcctgctgctataaaggcacatgcacacatatgtttattgtggcactattcacaatagcaaagacttggaaccaacccaaatgtccatcaatgatagactggattaagaaaatgtggcatatatacaccatggaatactatgcagccataaaaaatgatgagttcacgtcctttgaagggacatggatgaagctggaaaccatcattctcagcaaactatcacatggacaaaaaagcaaacaccacgtgttctcactcataggtgggaattgaacaatgagaacacttggacacaggaaggggaacatcacacaccggggcctgtcgtggggtggggagagggggagggataacattaggagatatacctaatgtaaatgacgagttaatgggtgcagcacacgaacatggcacatgtatacatatgtaagaaacctgcacgttgtgcacatgtgccctagaacttaaagtataataataaaaagaaactaaaattcaattagtaaataaattaaaaaaagagattttaaaatgagcttgagtagattttaaagtcaggacattttggatgggggagaagataagggtaataaaacctgggtattttgcagcaggaagtggagtagtagtttggatgtgggaatggacagcaggattggaaaatgggttgtcagttggagtgttatacataattttatttttttcttgctgctatagtctgtactgttctttgacgcccccaggatcctctgttattgttttccccgtctcccttaaagatttcttaatttcattcctattctacattcaagaaacagttattggtattaaatggcttctggggtcaggacattaatgataggtattataactcttaaaatatgtgtgtagggttttaaatacataggccagatttatcacattgcatctcatgcatatttaaaatgttaaatttatcctcaaatatgttttcccagaaatttttgaagaactttaaaaattaaacttgaaaacgcgataccacagaattaccacaagatggtgccatgagtatattgaaagtatgatagtttcttcactcccttgcccacatcaatattctgatggaacttattattaatgagtatggaaagcaagaaataccacaccaaggagtgaggatgtgtggacatgcatgtgtgggcaggatcatgctcatttgaaagactgagcaccttgtatgcagtaggcagaatctgtaggggagacatggcagggggtggggagggtgggaagagcaggagagatctttctttagttttcaggaataaaaattactacttaaatatattaatattgtccatgtctggaaaaaatctccattttaagagatatcaggaatgaacattaattttaaatgatgcaacctttggtttgcatgacagatttagagacaaggctagaatgcatcagtatgataatgtattttaccttttcagtagaaacacatagttttaaatgcttgctttcacttaatttttgatgaatcaacttgccatttatcattcaaccaaaatatctgacttttgcaaatataattaccatggtgaatgtataacaaatcattgcgtttctaccagtaagtgcactagataagtaaatcatttcagtgtgaggtaggtgggttaaagtatttacaatatacttatttctttaaacctcttaattagtaagttcagaaaactcgtttcatagaataattattatacaatccatgtattggatagagcccatatgacttatggtttttagtgaagggacagacttagaaggggaaaaggccttggtcaaaatatgtcagattacacctttgaaaatagggcatccgcttttctttgtataagtcacaggtccttataagagcactcaggaattgtctctcacttgtagtacttcagacctggtgatgatacatatagtagaaggaatactgatatacttttctaagtcattgtcttactgagaattgatcactgtttagtttccaagtattttacaaaatcctgactctattcttcaaagcaaggataagagttggtaccctttatctgttctccccagataaatttaattgagactgatattgtagggtttattgagattgaagttccttgggaatgagagtagagaattttggaaataggatgaagtctcaagttacaactctaaccacctcctgctgcacaaatgctttgaatttgagacagagctccagccgttttcaatggtgtcagaaatctaaaactatacctgacatagacttggcaaagtcattatagaacatctccatattctgtacatgtggttaaaaactgtcaaacaagggtgtggattatacaagtgtgtggattaagtacagaactctaagggattgatacataaaagagtttgaatggaagtttgataaaatgattaaaaggagtggttgacccttttttagtgaaggacggattatctttttctttaagaatgcttctgaatataaacttttacatattatatgtattaaaagataagagttgcttaatattaagtcttggtttttagattttgaaaaccaaatacacctttcagtgtggaaactgagtcttagacaatcatggcaagtgtttacatgtctgagtgatttaaatcatcaaaggcatatttaaaaccttggtgtctgcctggaatagaagtgttacccattttaaactaatctggggagaagggttttcagtagtgagccaagcccagtggtaattagtgagttcaatttccactggggggatgaatgtattttcacttggactgaccagctttcttcacacagacatttgactttcacatcttaacagtgttacagccaaggaggctgttggacagtgttctgggttagacatccctctggaatgttacagctgaccatatggttggtatatgtccttggcacctaatggtttttctcgagctggtttttgggccagctgtgaaacatatttgctcttctgattacatggagtttggaggaggtggaagggctggatattgtactttttaatgggcagagtgtgctggcactcacacataatgttaacacacttcatttcaagagcttgccctctggtgagcctgcactgcaatccagagactgttgtcctgtagacactgagtatttatctattatttaatggacttgatgtgaaaggtatagggagctttttttttaaatcatagccctgaagtgttactcatcttataggatagtaagttacttttggaagctgctgtaactccatcaaaccttcagggcaccattttggttgctaaaaaaaagaagaattcaccaaattatgttgtattgtcaaaaaaataaatgcagtttccttcttcagatagaaaatgactttgtgattgtgttctagatactaagagccacacattccagtctagtttgttcagtgaatagaaagacccctcttcacataaatgccacctggacacttccccagtgcaggtctaggccccaaaaggcacccaggaaatgctctttgaagacagcggatgttctattgacccaaaatcttaagtgtagtgtcaatgctctgctatattaaagttctttaatgtactgaaagaaaagtatttatttgggaagtgtagtcataagaaagactccaagcaaatgcaacacattattcttgttttttgagaacatttgtttttaaaatggattttaaaactaaacagttggctcttgatggcagaaaatattgctacttttttctaaaactgattttaaagaacctctattgcaagtagtttatagcatatacaaataaaacagaaatctttacttcataaggcaaaggttatttttttgtttgtgtctgacagtgtcacatgcactgtttaacattatggatattttgcttttgggtacaatgagaagagggtgagataacccaatgttttgcctccctctgaaatacatgtgtccttttaaaatttccttttgaaaattaaggtaggttgctaaaaaaatacttatgtcaagtgcctttcacactagtgggtatagagtttaggtgatcaatgagtactattattattatgttttgtatttttttttgattcagtcattttaagtggcttcttcttgcctatcttttccatgtcctagttttgtcatcgtgcattattgccacatatctgctctgctttgtgtctcattcttaacagcaccttccctcatatttttgcccatccattaaagtaacactaccctccagatttcttgcctaagcaagagaacatctgcttaggtaccatttcccaatccataactttctagcagtttaggtaaacatttatacagtccacaatctcttacttgcaatttccgaaatccaagaagcagtgagaactggaagattttataattcatattgatgggaaaacgtgacatgaactaatgtgagcttaaattatagcatttatttatcccaatgagtatgaatatgcacaggttttgctatagaatgttaatgtgtctgattatagagttgttgccccagaccccagtgcggcattatataacatctgccactggaggcattatataattcctggcatacgtagagtattacctttctaaaatctgaaaacgtttgaattctgaaatgcatcaagcccgaagggttttagataagggattggcgtataatcaaatatcctggtttaattttaaacttttatcttattactagggagcttcatgtgtggtaataataaaaagatttttaggcatacaatctctcatgaactattcctatgactattttcgaaggaaagtttatgtgtgtgttgggtgaggcagagaggacagaagagagagaggacactgaacaattgcaaagtcaatgatgcccaatgccttttctcataatacattcaaatgttgccctaggggcttcaggtgacaaatagaattcaggtggcaaaagtgactgtgaggggcaattgtgttcaatggcataggtatatgtatacgcacacgcatgtgcatatccaatcgtgtgtctaatctgtctccaagcaagggcatctaaccagcagcccgtaaggagtcaactttccatatggggacatagtgagaatgcccatgagagtgctgtgtttaatgttgctccagaatgctgtgttacgtaaatgtgtgctgcttagttttacacagatgtttcatattgtagacacttctaaatgtgtcatctcagagctggtaggattactagaactgaacccagtcatttataggagatcctcaaatcaggaattgcctttactggattctagtttgtctggccttcagagtctcaatgagaacctaaaaccctttttaaaaaattgaatagaaccttaaatgtgttgtcaatgttgcctcctaggaatttcttccagtttacttttgtgatttttaataaacattttatttcttttttgctttgcagtttgcatgcacatgtcaaatctgtatattttgtgatctcaaagcactgctactgctttctggggtatatgtatttctggggtatatctaatactgctttctgaccttgtgtcttctaaagacgatgtccagtagctcttgcatcttatattttagtaacaaaacagaaaggattataaaaagcaaaagtataaatttgggggtagttgggataaaaatacatgggtttaatgaactatagattttttaaaataatgagcaaagattatagtgttaaaatatctatcttgcatgtttattgttacacagaatagatttaaatctctattgtttatgaaattatcttagaataaaattgatggtattttgtcctggtgctagcatagcatcgcacatttttaactatcaccattattttaatttagagatgggcacttaggagttaaaggatgtttgatttgccctttaatggacatctatgtcaaatatatggaattatttttgttataattgtcatagtctccagtgatttcatttgtctatagcgaagtcccaggaacctacagctattttgatttatgcagcctttataagtcctcgtaatatagactactgatttcttccctgtatcctgctcattgttgaaaagccagagctatttttaacatttacacaatttcaatagatgattctttattccacaaggtttggtgctaaatctgtggagactttcataatcacatccttcttgtggtttgcttgaatttgatcacagtggctgatttcatgcattgataatgaaggcttaggttgcctgtttctcagcataaatccacctcagacttgtacattgacagtgcttctggtttcagcacacatggagatatagaattgaaattgctctgctttctttacaaatgactcagagtgtgcttgtccttccctaaaatgttgccagcatgtaaaggattttcaatgagcagtgcaataagccagcaactgggaaggcttggagcggcactgatataacgtggtgctgtcacacagataatcagggctggagccaagtctcggtagcgctgtgcattatcctggtcacatactggaagttttgtttatccaacttggttgctcttgaagctggtgagagccctgccaggatgtggagtggacttcctagcagaggtgagcgtttttattctaaaacttggatgctggggtctgggatgtcagtaacagattcttttgtatgttatgctgaatcctgtggagtcctcaattgtgtttatcacattgtgctgacacatctgaaggagcaaagctgaagagcaaaatatatgattctttaattttgttgcgaagtaactccttacatgggtgtgataaccatccctttctttctgtgctagctgtttgccgaggacatcttaccagtaggtgacttcctttgcattttaaacattctgaacaagtcagtgatattatgcaatttgctaccattactgaaagtaggtaattagcagtgttattatgtgtttcagatgttattaaaaaggctataaacaaaatgtactttgtagaatctttgacatgaaagacagataggaggagacaagtcatgtttcgagataactaagaaagtaagtgatgtggattacatactggagttgacaacttgtgaagctagacattattaataattaaaagttatgaccggtcatgtactggacaaccaacagtaattaatttctaacgactgtgtgccgaatgagaatgggaggaaattaacagtatttcttcatgaagtgtgttcttattagctgagatgctttaaatgtagcagattgtatcatttaaatataaataaaatacctgtgctcacctggagaggttaaattactagatcatcatgcttggaaaggtttgatgtagccttgtaagtatatggtatttgaaagccaactagataagggcagacacaaagttagcctccaagtagatggagtgctattgcttaggcttggctaaactctaattctggtgtttctaagcatgaatggagtgtgagggttataatgtattaaatagcattgtgcttattaagtgtctgtttagtatattaggttggcaggggaatctatttttctttgattggaagcagctagcatggcacatggggtgtgtatgtatataagtgtatgtgtttttcctgctatatttatttgaggcagctgttttatagctttcagctttaaagttatagctaagtgtgtatttgtttgatagaaggctcgagaacctcttttactgccagtacacgtaaagcttggctaagcagacgcatcaggagcaaaccatttgtgttcaccaatctgtctcggcaagtcccagggccactatcttgctagaagccactgtgtgcttttgaaagcatgaaattagttttatactgagcacatggtttctcgtttagcagctctttttatggtaatggtcaatttatggttcactgccaggatttcggtgtactgtcaaagccgatagcttctgctaaggcgtctctatgatttaaaaaaaaaaaaaaatggagagatgggaagaacctaattagaccctcaagaatagactcttaccttcaacctcatctgtgctctagatgcattgtcatttctctcaagttcctttatattgtttaatccaggacctacagatttaaagttgctaatatctgccactttgtcctttgctaacatgtgacatccaaatagttatgttctgaaatgtgaagtatttattttttgcaatacatttgtagaaaaccactctattaatgttggccatattatgcaattcatcattacacttatctgcttgcctggtaatgcatcctagagcactgttggagagagggaaaggctttaatacatcttatatttgatataagcgatttgtacttagttgtacgtgtatgtgctatgagtacggcgagttaaataatgaaattaaaacaacctgtagatacattggaaatttgacccaaaaaatgccttctttcatgcaatcatctcatttagaaaagcaaaagctctcaaatgctaaaatgatattaatattaaatacagtttttgtttgtttccacataataaaaatgaaatgcatttgtcaatgtgctaagaatgctttccttaaccttctctttctatcagaagataaccctggttgaataatgcattttgaaatagaggtgatcaaaattaccaggacatttagtggagtatttatttttgtgctgattctttgcattgtggtaatggatatgcaggtggaatagagtacatatttggatgttgctattatactttttccctcatgtggtcttgacaagggaactgaaaacacttcataaatcctgaatttcatgatttttttcttgttaattattagatctttgcctgggttaagtgattacacatgtaaagagtcaagataaaatattattgaaatacagagtgtaatatgtgccattataattagaaaacaattttgtgtttttagatgaagcaaaatgtgaaacttttttttcttcttttgggaatgttatgtcacaaatcatcatcagattgtcagggggactcagttttagattttgacttacaaataaatatctcatatttattaattccccaaagcccatgaaacaaattgaatttgtgggttgagaattagaaacttagagggcattgacattttctctttgaaattcctgatgatataacatgtttaataaatgaaaatctttttaaaaaagttttagaatgttagaattctcttagaatagtgacatttgtcgtattacatagaacataggacattcactcagaagaaagaagggattaatttggcatatctgcctgaagtcttagtagcaatttctccttcagaagtagtaggatttatgaaatcatgaggatataaatctcagtgatttgcctgcatcttttcacttttgtattaaggtatagcatcttgaattattcttcagcagttcttaaaaatgactagttacaaaaaatagcagatacaaacctgttttagttgagaaacatgattgcaaaatgaaagtactatccaaatttggctttcctgattgtataaatccaacaataatttgggcaatttatagagtttgtactttcttttgaggtatgttgctaagatgagtatactttagtgagaaagttgcttcttaccttaaagctttatttactttcagtcttttcacttactttttttcctacttcctattaatgaactaggaacttcaagttttagggtttccagatttagtatataaaaatatcgaactctgagttaaatttgaattttagctaaaacaataaataatattttagtatatatccaatgcaatatttgggacatacttaatattgaaaattgttagttgtttagctgaaattcaacttggactaagtgtcttgtattgcatctggaaactctacctactttctaaataaaaaagtgagtctccagtaatggcctagaaaattggttttaccagtgccaaaatggaggctgcacattcctgtaaaagtgatcagttttaactgttagggtttatgcctgaaaactcctagggaaagaaagttactatctgagaaacttaaaatggtgtcaagaaataaaggactgatggaatctaaattacaaataataaatgaaagccttctataattactagtataataaaggcagcacattaaataagtatcagtaacattttgaataattaatgagtattatacaattaatttctaattgtcatcccttgtcaactagaatattttcgggattttccttctttagcaggtttgagatacttattaattcattttgttttgttgtagttaagatgcgtaatgtcaggtgcctctttcaatgccttctcccctacccgttcatctggcctttatttaaatatttgttacccttttgattttaggacttagttctgactgccacccactagatttctccgagaggcagagtaacttgcaaacttgacctagaagaaaatctttggaatcctttaattattccatttaccatagctgaataaaatagaatagatacaatatttattatatacctactgtgtgcctcatatgatgtcaaaatatttataggtagatttttattgaattcttttaacaactttataacatattaatataatattaattgtgcacatgctcagctgtttaccaaaactccattcccacacccaagctatcccaattttaaccacactggaacagaacagaatgttctatcctggatctgaatgttactcttagatattgggcaacctccctgtggaataaagggtcctttgctgagagtgttcatgtcacttcaggccatattgcaaaatcccctttgcccactcagcttctgtattacctttcttctcttttctcacttactaatattcccctcctcctttttgttaatatccttaacagtcaaaactagacatcagtgtataatttgattctcaaaatgagaaaaaaaatcacagaagtgaaccacatgtactataacagaatgtggtgttaggagaacctgcagttgattaacaaataatatggacaacatatttggagtaatttcttaaacctaacctttctgtttccagtctaaaatgccacctcagttctctgtcagttatgcaacattcaaaccaggaacctgttttgagcctgaattgatcagttgaatgtgagtgccattaacccaagttttggaaatggattaagtctaccatcccaagaaagtacttcttacaaaaccatatcttctttgaattaaatgttactcccaccaaataatctagttcatttttcagtgtctattgccctagtggacaaattcctgttttcttccctttttttcttgtctgttaacactatacccttatttcaatctgatcattttaaatctctcaagatattttttgcctccactcatcaatctgtttcccacttttgactagtcataaacgttattgtgttatgcgttacttcttctactagtttaaactgatgttggtggccttttcttgtatttaaactatgctctttaggaaaagattctgatccctttttaccttaaatagtctactcccgtccccatgttggcatcaatgtcctcctacttacttcagtcctatttggttgtgtgacgtgtttgttatcgcaaaataccaatgtgaatccataatctaaatttcaatccctaaagatcttccaacaacgtttgtcctcaaatttttggaaaaggtgctgaaaggtaagttaaagttcctaatttgaagaattctatttcttttaatttcttaaaaggtgatgctggtcaatagctatcttttcttggcaaatggcaattgaatgacaaaaagatgcctcccccagggaacacctagactgtcagagatgaggagccctctgtccctgacttcttccagggactctgaaatgccactgggacatttagcaaatcatctttttgctcacatttcaaatttgatgtgtgaatttcacttggagatctatagtactgccagttttctgtttctctgattcattttccattagtggtggtttttaagcagacaatggaagaaatgactttacatctagaactctcccttccttccagcaagttaaaggggaatttctttactcaggattcttgggtgctgggagagggcaggctacattttgaagaaatttcaaaatatccaggagtaagcagattcagaaatgaatctgtaagggcttctttttctgtcatttttccatactttctgtattttttattattgcacaatgggtaatagtatagttataataaattagttaactcttaatctaggagcttttggattttgtgtaatttaagtacgtagctacttttgtgtgatttagtaaggtaagcaatgaataccactcttgcagtagttagaaatcctgtaatgggctctgaatcatgctttaatgggggtaaggagaaaatgggtatggcttggaaatgatctctgatgcttatcacttgcttcagctacaactgatttaaccagcaataaccaaaagtttgattaagctatactaatactccagggttggtaaattttgtgccagccaccatgatcatacgattaacccaaactaataaaatctggtgaaaagcgtgtttaaggtaaacctacagtaaagctaaactccgtctaagctgtaaaaagcttcaactgaagtaaaaataaactacaaaagtgactttaacaccctgaaaacacgatagctaagactcaaactgggattagataccccactatgcttagttctaaacccaaatagttcaaccaacaaaactattcaccagagtactacaagcaacagcttaagactcaaaagacttggcagtgctttatatccctctagaggagcctgttctataatcgataaaccccgaggtacctcatcatctctcaccactcagcctatataccgcatcagatcagctctccagcagcaaatattatcattgtccttttaaaatggagtggatgcaataaatggtgtataatgagacttaataataacaggaatgatagttgactttcaagctaaccatatgcaagacgttttatatgtataaactcatttaatctttacaacaatcctataggtaagcattagggaaactgaagtacagagagattaaggtaccttcccaaagtaatctagctagctcagctgagatttgaatttgcagtggtggtggaatccatgcttttaaccagtgccctagactagttctctgtgagatatttaacaaagtctttgttgatattattttgtgaacaaagtagaaaactctggactgaatgacagtgtaatttcgtggatttgtaactggttgaatatctatacctaaaatctacctggccaatattaacttaagggaaggctccaggactctgcaatgacttggtgagaacattgatgacttagccattaaatctgtagatgttatcaaactgggataatacatatataggaagacacaattgatgtaaatcctgagccacctcccacactaaataaattagaatttctgcagctgctatctaggaatcagtatttttaaagctcccaacgtgattctaatgtgcagcctcagttaaaaccactattctagaaaagtggcccaactccaacatgatcagtttcaactaacagtaagtggaggaagtagtgaaaaacgatgtaggaatattgataaaatgtaaactcatcatatgagtcaaaagcgtgatatgattgtttcacacaatcttagtggtctcttagatgggaattgtagaaatagagtatctataacaatgaaggttggagtcctgctctttgctcagctgggcaggagcgtgcctggagtttgggtgaaatgcagaggagggccttaggtgttttcatttgaaggtgaccagcctggtcaaggtgcactgagtaccttatcaaggggaagagattatcaggggacttattttatgtaacattcgaattatattttttcaataaagctcttgggtaaaattaatgtcagtagacagagttttcaagaagaaagatttttgcttgatataaagaacttcccaatagagcagtctgaagatgaaggcgttccttttttctttggacatggtacagatacctcatgggtgttactgaagcaaaaggcagattgtgacttaggcatatgataaaggaggtttaagggttggatagatcattaaagtagatgatcttctaacttcagactctatgattatatgagcatgttaaatttcaaaggtaatgcatgagtgaccatttgttcattacattagttctgcattcaggagaagcagtggagtagtggagttatggaacagtttctgaggcattcaaagcgcagctccaccacaatttagctgtgtgatcatggacaaattacttcactttccaagtctcggtttccttatctgtaaaacaagaataataatagactcaattttatttgttgcaaagattaagtgagaataatatatataaaggtttttgcatagcaagtggagagaacatgcggggaatatgatgtaatcagaaattatcctagtaaaagctgtggggttgcaattgaatttatgatttggcatgtggtaaagtactcaataaattcagctgttgttatttttagattcttttttcaatcatagatgtcttaataaaagttagggtctgaaagttaaaacctaaaacaggtagatattgatgggcgatatggagccggattacaggagacacaagttagatggcacaacatgtgaggttttgagtaggtgggggccacataaagaatgggcctgggcaggaaaaaaaaagggagtttctgaaagggaattgaggaactttattgcttttaactctttacccatttccaactattatttcatttgatccttactataaccctgagaagtagagaaaagtaacattttctcgttatacttgataataaataagcatcatcaaaaaggtaagtgactcgctgaagacaggataactggaagttaaacctagacctctcaagccccacaccgccactcaacagctttcatatgtcacaccaaattctgcccagttccatgtgcaacccagcttgaatgtttgcatttgaatgacaacttaacagtaaagactataaataaacaatgtgatgaggtttggaaatgaaggcaagacgtgaaaagagaacagcattagtgagttgcatttactccagtataaagttttgttttgttttgtttggagacggagcctcgctctgtcgccaggctggagtgcagtggcatgatctctgctcactccaagttccgcctctcgagttcaagtgattctcctgcctcagcctcctgagtagctgggactacaggtgctcaccaccatgcctggctaattttttgtattttagtagagatggggtttcaccatgttgcccaggctggtctcgaactcctgagctcaggcaatccacccacctgggccttccaaagtgctaggattacagacgtgagcctacacgcctggccctggtataaagttttaaagtgtttctattgattggaagacagcatttaaagaagtctggaatgatgattaaaagctcaagaagtagctttaccagtcaatgatgttaacgttattatcacattttatcatatctgactactgaaagggctttctgtgtaatacgattaactgtccttgacacacctcatgctaaacggcaaacttctttagcatgacatagcaaatccaatagttaataagaatcaccatatagtaaaagcttaatggtccaatgagttgagggaggaccaacaacagggactaaagtttgtgctttgatttgtcaagcaaaataagagctaaaaaaaaatctgcaaaattgatagagaaaaaaaagtcccattatttattttttagacaaagttgtaagctcccaaagcaagtatcaagtaagatggagagttttataaattattctgcctactcttattttaataaatatagatgagtagtaagtaaaaatagtccttcacctaatcagaacctataattattagctgtaattgtcacagtcatggttcttgctggccaaggtatttatttttctttttcacatttaaatatatttacataaaaataataaaataaggtatatttaaggaacaggcttttttttattattatactttaagttttagggtacatgtgcacattgtgcaggttacatacgtgtacatgtgccatgctggtgcactgcacccactaactcgtcatctagcattaggtatatctcccaatgctatccctcccccctccccccaccccacaacagtccccagagtgtgatgttcccattcctgtgtccatgtgatctcattgttcaattcccacctatgagtgagaatatgcggtgtttggtttttagttcttgagatagtttactgagaatgatgatttccaatttcatccatgtccctacaaaggacatgaactcatcattttttatggctgcatagtattccattgtgtatatgtgccacattttcttaatccagtctatcattgttggacatttgggctggttccaagtctttgctattgtgaataatgctgcaataaacatacgtgtgcatgtgtctttatagcagcatgatttatagtcctttgggtatatacccagtaatgggatggctgggtcaaatggtatttctagttctagatccctgaggaatcgccacactgacttccacaatggttgaactagtttacagtcccaccaacagtgtaaaagtgttcctatttctccacatcctctccagcacctgttgtttcctgactttttaatgattgccattctaactggtgtgagatggtatctcatagtggttttgatttgcatttctctgatggccagtgatgatgagcaatttttcatgtgttttttggctgcataaatgtcttcttttgagaagtgtctgttcatgtcctttgcccactttttgatggggttgtttgtttttttcttgtaaatttgtttgagttcattgtagatcctggatattagccctttgtcagatgagtgggttgcgaaaattttctcccattctgtaggttgcctgttcactctgatggtagtttcttttgctgtgcagaagctctttagtttaattagatcccatttgtcaattttggcttttgttgccattgcttttggtgttttagacatgaagtccttgcccatgcctatgtcctgaatggtaatgcctaggttttcttctagggtttttatggttttaggtctgacgtttaagtctttaatccatcttgaattgatttttctataaggtgtaaggaagggatccagtttcagctttctacatatggctaaggaacaggcttttttagtccatagccacttttacactcaggcagtatacatattctattattgtacttatactgtgtattatttattttacaatatctttctcacctgttagtatatgagtactttgaggatagggtctatgtcttgagtctttaaatatgtgactctcaatataatacctggcatatgataataagtcatagacttaaaatgttgactaaaggacagaacacttgaatatagaatctgtgaatacttgtgcagaactcaatactttatttgatattgctgttcataaaaagattcattcttcaattaaaacatgctattttacttacctgtcagatggataagatcaaaccgtatggtagcacaatgagctacctagtatgtgggcatggggcactctcatacattgttatgtggagtatgaattgattcatttaatatttgcagggcaatgtggtaataactattaaaacttaaaaggtgtatctcttttgacccagcaatttcactaccagatttagttaacagatatacttgcatatgtatacaaagacacataaaataataaatttccttgcatgtgtgtatatacatatacataaagattttattgcaatgttatttgtagtagaaaaatacaggaaaaaatactcagcaatagatgataataattatggttcatccatgccatgtgatattatgcagtaatttaaaataataagatatgtctgtaagaactgatatggaataatgtgcaaaatataagaaaaatttgcaatatgcagaacaaagtatatattgtttgtgtaaaaggtgtgtatgtttgtatgtgtgtatgtacatatatacatacatatgggggaaggaggaggggatcaggaaaaagaagaaaagaatgaatttatttcatgggagactggggaatgggttcaaggtagaattactttaaactgtatgctctttgtgctgtttgaagtagacttatatttaactattatactcttgtacttttttttttttttttttttgagacggagtctcgctctgtcactcaggctggagggcagtggcacaacctcggcttactgcaagctccgcctcccgggttcatgccattctccggcctccgcctccggagtagctgggactacaggcacccgccaccgcgcccggctaattgttttgtatttttagtagagacggggtttcaccctgttagccaggatagtctcaatctcctgacctcgtgatccgcccgcctcggcctcccaaagtgctgggattacaggtgtgagccaccaactcttgtacttttaaactttttaacatacacatggctcactttgagaataacaaatatattcacattaaaaagaaggtaacagatgaaagaagtggaggggaaatggaaggaatgtgatgtgatcaaaagttatcacagaaaaagcttgtagagttgctagatgatgactttgtggtttctagtcacagttaatggatgggaaaagatatagaggagaagtcatcccaccaggtaactggatgatgatccagcctgttgcccttgtcctcctaagtgtatgttgcctagaaggtcaagacagaaagctggtgtttggtcaagtcctgagcaggagttgcgctgaccctctatgatcatttctggtatctaggtttagcctaactgataatgcatgtttaccttccatacttgctggaaataactctgcaagaattcatgattgtacatagtcatctgaatgtccctcctttaaaacttctacttttcttacttttgagtgtctatgtaaaacattaagggtcttggggaatttcagctttgtgttggaaatgaaaattttcaaggtagctcaatgcaagtcacaccaccatattaaaaaataaaggaagaatgaccaaaaccacattaaaataataataaagcataccttaaatctgcaaatgtgacagtattcaatgctgcactgagctcaccgtgttgttttttaatctcatacatttagttctctgttggagaaacgcataacactgggtgatcttacctttggggttgtaatacagaatcatgatgagatgatggacattttatgatgaattctcttgcttctaggagtttaatgctgagttagaatgttaatttaactcattctttttgtttaataagctcaaaatcccagctgagcccaaatgggagtgattttatcttatattcaacatcagcttgcagaactgaagcatgaaaggtttgattaatattatgatcagctgactattgattatctagctattttccttctgtcttctaattggtccaaattggctggactgctgctctttgaaatatgttcttctttgcatttcaagatgatgctattggattttcaccaagtcatacatacccttttcctattatgatcagctgcataattgctggcatttatgtatttcctacacaggattaagggtaaagttagtgtttgtgaatctataaagagccaactggacaacagaaaagccatgatattagtctcagtgccatgctctaaattggctgagccaatgggacacaatcagttgacctaattctaaaattctgtgaatttccatctttctttgcctcatgaaaaatgacagcaaaaacagagcaggaaaagatacttcattaaactcctgctgtgagacagttttaataggttcagagactataacctcaaactataaaggctgagcatttgtgcaaaaaagagagcgatcttaatccaaaaaagtttctttcctttgctaggcattctttctttacatacagattagtgccaaatggtggtctgttcgtgtcatgcctagagggtgtggtggctttgtgggactgtcaagaaataagagttggcaaagcaggcaagctggttgcagagggcctggtgtgcacatttccggtagtcttcccagctctggcaacatgttagaatcagctgggaaacttttattgtttgtttgtttattttagaaacagggtcttgctatgatgcccacgtgggagtgccatggcacaatcacagctcactgcttccttgaactcctgggctcaaatgatcctctcactccaacctcctgagtagctgggaatacaggcatgaggcaccacttctggcaggagatttttaagtgataccatgcccacactccaccctgatcaattaaatcagaattgctggcatgggtgttattaagagctcctcagtttgttctaaagttacctttgagaatcaccggttaaaggggttgatttgcgctctgcagtgcaggtgctggagagtttttgaaagaagcaccacaaatgaattgattgtgaagaaacagttacgagtgaattaagaaagtacacatggcaaagattttgtgacttggtatcaggcagccacaggttcgaacactgaccctgactcttgctatctgtgtgggaaagttctcttacctccctaaactcagttttctcatttatgaaatgtacctcatccagtaggtatgatgatcaaatgaagttacatatgccacagaatatagcacaatgcttagaaacgtggtaattgtgggaaaaagtaaaagcagaggtacacctttctaagtttgaattcttggctacctctttttacaaagtgggaacagtactagccaaatctgaacatacaggttgaaaccaaatgtatacatattttgcttgaagaaatagttgcattttggtcaggtaaatgtgtattttcaaagccttaatctatgttaacatgtgacttttatgataaagtctgagttatattttgatggtgtttggtaaaaaggtggaaaaaggtcccagtaaactgagtttataacttttgttgctttagaatatgctggtcattgtggacaatcagtgtgtggcaaggactctttcaaatttaattatacttttgattttaggctgcttctcctctatcttgttaccattctatttccctttgtatcataataatttttctattacttcacactaagctgcatgtacatatatttgtttctgaattgttcattcattcacatgatcattcaatatcatttattgagcttaaattttgtactaaattatttatcagtatagaagtagtacataatttacaaatggactttattgcaataattgatttggaagttaattagtggctttgaagcattttctcatacatttactattttaaattaggcatagacttccaagctagctaaggatggaggaagaatcttgcagaaaggagtagtgcacaatttccataggaagaactaaagtttatactgctaatagaaagtaatgaagaaacggggacaggagatagaacgtaagaagtcaaggtatatattgaaatgttcctattatggtgaggtcaacatttaactccttttctagaattatataacatggaagaatgtcttcttgaagaccagaagaatgagagaagaggtaacttaaatttcttcacaggtggtggtaatatgatttgtcattgaaattagacacttttaagagttattaatgattaagccaggacccgggcataaacttagtgttacctcatgctggaatgtgtggtcactctaagcagggtgtaatcaatcttaaaattgtcccaatgcagtgttaaatagattgagcaagtgtccagatatatttagatttaacaatttagaattaacaactaaagcaaccctagcctggggatactatggtgtattagtctgtttctgcactgctataaagacacacttgagactgggtaatttataaagaaaagaggtttaattgactcacagttccagatggctggggaggcctcaggaaacttgcaattatggcggaaggggaagcagatacatcttacacggtggcaggcaagagagagtgtgtgaagaaggaactgtcaaacacttataaaaccatcagatctcatgagaattcactcactatcatgaaaacagcttgggggaaccgcccccatgatccaatcacctcccacctggtctctgcctcgacacatgggcattatggggattacagtttgagatgagatttgtgtggggacacagagcccaaccatatcatatggtatttaatcttctgccttcctgaaaactaatagtaatgtgacccttggaatatttacaaaattggtgaagatgagtacttcatgtaagcattaatgcaacttgaaatgtaagaacaagaccaggcaagaagctacaagttaataatatatctctgaacttgaaaatgcaaggtttatccttttggttttcactctgattttgtccccgtggtcttgaaacttctgagaggtttacatctgtttacaaattctgtttgtctaacaccattttgcactcataagattctgtttccttggaatttactactagattgggtccacctccagctgtctcaaattgtgtttaatcaccaggaaagttctgttgattgtcaatgatgtttgcttgattaattcagctctaactgtgtttcgtttttacctgtgtctttcaggatgtcctagaaaattaaatgtttccttttgggattttcagggaactggaactaaaaagaaagttaatttccttggtttttttttttttttttttgagaatagaatattttcattagttttctttaatacagttttgactttagagtaaatattttatgtgaactaaattttctttgaagtcgtgtttttacttcactatgtcattagaatttggcctattatttggctaatactctaaagcataatctacttgaatctttttaaaagacattactttgggagttggatttaagaaaaatttaaaaagtacttgtgctacctgagtttttaataattttcaatagtttcctgacttaatcttttatcaagaatccataatgggctttaaagttataaatatataaaatggaatggctttttctgaggaatattttcccattgatttctattactcgttcttcagtgttgttttcttcctgtcccaaagtcttccctaaagattagagtttgcaaaccagtattaaagattttttgatgacatcagtcctttgggaagaaagtgcaatatactgggaccagctaatagtaaatttaaaatcaaagttttaaaaaattttgggctaaaaacatattaactatgggaaacataaattttcaagacccaagatccacaaatgtgtatttttcacactcactgctctcttccatataaaagaggtcatggtgtggtggaaagaacaccagatcagagttgggttttctggattctcatcttgagctaccaatggattttgataccttcagtaagtcacgtagttatgtgggtgttaaagtcctcatctccaaaacaaggaattgagactaattttttttagtatcctttaagagccacttttgctggaaaattctaaggaaactttttatgtgattttgtaggtgcttgaagttcggctgcactcacagtttaaaaagagagaagaaaatgggtaatgttttttattttctccagaattagctgttctaagaacacaaaggattatatggagattattattgagataactacattcagagggtttaatcatatgcattttattcagacaactttctcattgatttttgtctgaaagagtcaaatctgacaaaaaggcagttgctctctgggaatgggaatgagctacatttgtttcaagagtcggggcattttttgtgattatgatgttctacagaaacatcttgaagtgcccatattgtttgttattatcaatattcatgcattttactattaaacattctttttatagacttcacaaaaatgccccagtgatatgatttgtcacccagtgaaaacctgctgcctccaagctagtctgggcatctgctcacaaataagatttcctcaatgttcaaaataaatcttttctgtcactttatggtatcttttgatgcactccatatgtcttaaatacataggatttaggtgtgacatgttgtttttccatagtggttattcaaatcagtttttatttggtcatattcattggttacatttttaatcatgtaattcccagtttattcttatgttgtatataattctaagtttgtagcaagaaaaatatatctaagcagaatggctacactgctatggtctacttaagtagattataaatgttttgaggtggcaaacgttgttgctgtttcccatgattactccttaaaagggcagatgtagccatttatagctgtagcaatcacacatttttcagatattattttccttattatataggacttcccaagtgtgtcattataagatagctcatgctgcaagatcctaagattgcttagatagcacaactcctttgaaaattctgtggacaagaaattaaatcggtggtattttatattgtttggagattaatttttggaaagctgaaactgatggatttccaaaagtgggataattgaaatgaggatttattttaaaatattttaagtttataaaaataataaagtcataaaattgagtggttatcagataaaataccttgcttctgattcattcaactcatctttaaaggcagctgagatctctttttaatgttgagtatctgttcatctcatctgaactcatcgctatagtctgagtgctccctgaaacacacacacggaactctacttgcaccacaagatgactatttcaagacaatgtgatatactcatttaagtcacacattgtggttaaagtactcgggttaaagtaatgtggattctaatctccattcttcattaactagctcaatgtccagtcaacatccagttgcactacttaacatctctgtgttttatctcatgcttcaaataagaaaaatgctatacatctacaaaactgacagatatcctatgtgcattacataagatgatgtctatagatgtgtaaagcacaaatgcagtaatagtactatattatctcctcctcatcattgtcacaagttatttattaaacagaagtagcccacaattttttgactacttgtgtgttgatattggactttgtcaatgtgaaatgatgtagaaagcctagaacaggagcactcaagggtgacttgtaataaaaacactaggccgccaccactacagtgtattgaagtcttaccctgtgccaactactatgttaagtgctttatgtataatcacatttaccgtatgaaaaattgcttcagtatagtactaatactcccatatcctaatgagcaacagaggcccagaaaataactgcctctaggtcttacagctagtaagtgaaagagtgaggacatgtgattccaaacttatataattatatttttaaaacaatatccagaattggaatgggccgatgatagaaggaaacacacaaaggatatggagaggtgcaagacatgcattaagaagataaaaagaggcatgaagccctcaaataatggtaactggtttgttagggcaataaatcaatgagattttaatgaagggaaagatacaggacaccaaaggtgaacctaccacactactcctttttttaaactggtatttcatacttgttgtaaaggaagttgagaaggttgttgtggagagaaagtttgaaatgacagttgtccacaagaatgcaaaagtaggagctaccactttagggagatatgcagaagctatgactctaagatttcattttaagaacactgtagatcttttcctataaggtgggaaggtagtgtgctattgtctagatttatctctctctctgtatatacacatatatatatatatatatatatacacacacaaacacatatattcatatatatatcatgtatgtatatatgagatatatgatatatgtatatatgatatatctgagatgtatatctatataggttcatatatttaaaagaatctgggtttctttgaaacatcttatcagttggaacatagtcattgctatcaaatatctaccttttagcctttctcaaacaatttgcatagtaattttttgttaaatttctgtgctttcagttgtcagttttgcaccatttcttgtcaatttcacactgtagagcagtgtgaaactgacaaagctagagaaatacagaacattatgaatacatatcaaaactatactgtgaaaaagacaacacttaatttatagaatccaaagaaaatgtctaaaaattaccttcatgtatatataatatatatgacatttatatatcttggaagaaaatgtgtgtatatatatattcataaatatatatacatgcacgtatgtgtttttatatatatgtgatgagtaattttaaggtaactgaaccttgtttttgttgactatacaaagtatgtcatagagaagtatagttaaagcagtttttcatttataactaacctattaattgaaaatctacaactttcctaggctggagtaatttcacttgacatttctgaatacgtaggtgtttagaaattagattacttgattgaacagtatacactgaacctttgatcacacaagcctcttttcttactatgttttgaaaaatagctgtggctcctgatctgataggtgaaattaaatatacattatataagtttaattactgttgtgtagtttcccataaatgtacagtagtgatagtatttattacaatgcttattttttatgtgaattatgtaatttttctcaagttaaatactaatatttatggatgcctaccaacagcaacatagatttagaatttactttcaaaataagctaaattcatagcaaaatggtttaaattataaaaatcttacattaatttctataaaaatcattcatttatttgtgcagacactattgtatgcatcaaggatgacagacacattcccatcctccctagcttcccagcttactgtctagagaacagttatttattagaatttgtcttaaagagtcaaaataattatcaacctctaaaaaggagcttctatttcaatatttttatcctgcaaagtatcaccttagcttcttgtgctagtcttaaactaaaattatgttagaataatgttcactaaatatgatttgtaacattgtaactgctgtgctgagtcagcctatatgaatggctttccattagataaactcttacaaagtattttctaacattttagtgaattttgaggcttaattcttaatagggtaaattatagagtgattctaccttgattggcatgtctttggaagaatttacataactaaaatatttttgagaaccaatttaattgaagatttagacagtttctttcaatactgtagatttcgttcttgataaccacatattatcacaaagccttcatttagttttctgatgcctttgttaattaatttattattattattttactgagatggagtcttgctctgtcacccaggctggagtgcagtggcgcaatcttggctcactgcaaacttcacctcccaggttcaagagattctcctgccttggcctcctaagtagctgggattgcaggcgcccgccaccatgcccggtgaatttttgtatttttcgtagagatggggtttcaccatattgatcaggctggtcttgaactcctgacctcaagtgatctgcctgcgttggcctcccaaagtgctgtgattacaggcgtgagccactgtgccccacccaatgcctttaaattgcttcttttaattttcactaacataagattgtactaattggtaatactagaatatactagtttttatatgatgtatgagcagtgacatttgtgagtccttgattttactactttattgttttggtcccaattgataaccaagcaaagaaacttagcctaattagtatgttaagaatgtagagtatttttaaatgaaaaatatataatattttcagaaagtatataaaaacttacgtagctttgaaaaattaggcatcaatgtatctagccccttattcaaaaataaaaccttaacctcagataacccttgcttcttccttagttcccagaagtaattcctgtctggaattgtgtgttaattattctcttgcttttctttagtttaccactaaatatgcgtgttttaaaatatatttagtttttgcctactgtcacatactcatccataatataatttttaagattcatactttttgatgtgtagctgtatttcattcattttgaatgcttatttagtacggcaaaaaccgcaattacttttgcatcaacctaatatattttgtatatcctacatttcaatttatttatatattctactgataatccacattttggttattacctttcttaatttaattagaagcaatactggtttgaacattcacgtatatacatatgtacagctttctctgagttatataattatactctgagggcatataatctccaggaagtgagtttcaggtttaagagatgtgcatgttcaacttgaaatttttttttctgttttatgctatagccccagaatactgccagatgcattgtaaatagtcaattattatatattaagtgaatgaatgaatgccaaagtatttccctaagttatagtatcagtttacactctgaccagcagcagatgatcagtctattgtgtcacatcctctgcaacacttgagactgtctgactttttaaaattgttgacaatctggtggttgtgaaatgctatctcattggggatttaatttgcatatccctggtaactaatgaggctgagcatcttttcatgttttttggccatttgtgtttcctctttggtgaaattcctattcatatcatgtgaccattttaatagaatcactaatttaaaaaaattatttgtagtagtcatatagtagagctaattctttttcagttttctatgttgcagataaattctcacgtggaatggcttgggtttttattatttttggtgactcttagtaaaattaatctttaattttaatataatcaagtatttttattgcttttatgaattgtgctttttaatactccatttaagaagtgtttctctaccttgagattatatggatcccaaatatattaatctacaattgctataatttggctttaaatcttgaatttaccagtaactgtttttgtgcagtcaattttatgcatttttctttcttctgtatagataaccagttgttccagagtcatttagtgaatagtttcttcttcccctctggctttcagtattcactgtaccaaaaaccaagtttctgtgtatgtgcaagtttctttttatactctattccattccattgaattgtttgtctctacaccaatgtcataatatgttaatatctgtgaatgtataaaaattcttcacagctgactgagcaaagcactacacattgtttttcttctttaggaatgatatctatcttggccatttgcttttccatgcaaatgttgagtctttttatctaagtgcatggtttacttctccataaatttatatcttccttaaaatcttcatatgtgttttataactttcttcaaaaatggctcacacatctcgttatatatacttctaggtattttacatgctctgctgctattttaagtgatatctttttataacatctgtttactaattgatcattgttaatacatagagaggcaattgactttgtttatttgtattcatcttgttaaattgtccaataattctaatatttatctttagactattttatattgtatataaatataaatcatgtaatctacaaatgttaagtgtctttgtttcatcttctctatttcttagaccttgtattgttttttgtttgtttgtttttgtcttattccactggccacaacctttagcaacttaaatggaaatggtcaaagtatgcattattgcctttattctttactttatagggaatactttcaagtttcatcaataggtatgagtttttttaatagctatcctataaatattatgaaattttcttactagtatactaacaatttttgttataaaaaatattgcattttattaaatactttttctctctttattgaaataattgtatggttttacatatatttagttcacaatatttaatttttaatccattgctgaattcagtgtgctgatgattttgttcaacctgttatgaggaagaatgaaataatttcttgtattttgctgatatggttttgttatagtatgtaatagcctgataagtaagttaagaaatatgtcttcctttttcattctttggatgaaaatttgtgagattgaatttattccttaaaagattagaaaaactcacctttataaccaatcttacataaatgatttgggttttctagttctacttgagtcaattttggttaagttgtattttcctcagaatgttttcattgcgtttatgttttccacattgtattataaatttattaattatagcccttaatagccaacttaaaattttgaaacatctctatgtttttcttttcattgctaacattgttgatttgtgtattcctttgtaatgtattgaaattttatcattacttaccttttcatctgtagtaattccttggccttaaagtctatttgggacattaatatagttacttcaaggggctgggcatagtggctcatttctgtagtcccagtgctttgggaggctgaagtggggggatcacttaaggctaggtgtttgagataagcttgggcaacataccaggaccttgtctctccaaaaaaaaaaaaaaaaaaaaaaaacagccaggcatggtggcacacaactgtagtcacagctacttgggaggctgaggcaggagtatcacttgagcccaggaattcaaggttatagtaagtgtgattacatcactgcattccagcctgggtgtcagagcaaactctgtaataataataataaaactacttaaaggttctttggtattttcttttatatttcttataaagagcatataactttgttatgcttttatgttttatatttaacctaatatttattttgaattgaatccaaatagttgagtccatttatgctgatagagataattgatatgcttggatttctcttctaccatcttatgtgttttctctttcccttctttcctccctccctctcctccccttgcctcccctcccattccctcctctcctcctccctttcttcccctcccctccttctctcccctcatccctgctctcctttcctctcccctcccctcccctctcccctgctctcctttcctttcccctcccctcctcccctcccctctcccctgctctcttttcctctactcctttttcatgcttttggatggaataccctgtgtctgttcttaaaatttcatttcagctttctacatgtttggaaatttttattctaaatgtattcttttggtggttactccagatattttaatttcaggctatttctcccaaaaattaggcattattatcactattttaaattgttgatatgtttttggatttaccctttgagagaaggcattattgagcctaaatctgttttgcatgagatgaccgtcgctttaccctctcccaatgttgtttccttaggaacatacttatttaagataagtttggaacattagctctgttcaatactgtttactgtgaaaacaactcctgatttggactgaaagaactgttaattaacatacagacctgggagctcatctgattacgaatatatgaaaatctgttgaagaaaacataacctcagcttccttggatggttccctcttaactgagtgtataccttgcggggacttggaaaatacattcacaggtaattagaagatatggtccccttcatgtatgaaacttccttatgtagagtagcctgcatatatttgtgagatctcatttcttaaaattcacttgagcatatttttataggatcaggaaagcaatagctaggctgctgcaagaacatctattgaagatgtatttgatgcaatcatgttaacatgctgttcccactgctgttatctttcttagtaaacctggtggcagttaaaatctattatttcctgtatgaaagttagtctgaatccaaaccactgctggtcataccaagtgggcaatgcagcccgtatatttgccaatagctttggttttcccttcttgaagctcagatgttagtaagctagtatttccttgtccttcgtctgccgttatagcctctggggaaaacatagtgtaaaatgtcagcttacaaagagggagcatgatgtatttgtaatggatatataatgaaagaggaggtggagaaactacacctttcacctgggtgcagggagcactgaaagtgacaggtaaagttaaaggtggcaaggggttcataggtattgtgattgcctcctctccagcttggtcggctcatgcaataggaatggtcatcttaaataggttagtaggaaagccagaaaacaatggatgtttaccctggatgtcctttgaaacctggggtgggctcatgggtggaggcaggaaggggagacttactagactaggttgtccatgggcaacatatagaaacttaggagactgaaaatggtggcatggtatggttaggagggcgagacatgcagaagttcctggcagttcatgataagctggcttgtgaggaggatttctgaggaagatcaggtagattatagaaaaaaaaaatatatatacacacacacacacacacacagagttttaaagtgtgagtagatttgtaatcttcacattatcttctccttctgctgtctgcttctatgagtgattacctttaaaatgaaaatagaaatttggcttttgggttttttttttttaatagatacagggtctcactatgttgaccaggctgttctcgaactcctagcctcttctctaggtctaccaaagtgctgtgattacaggcatgaggcaccacatttggctgaaaatagaaatttgtaaagaaatgatatatgtagaaggagtcatttaaaagccaggcattcataattctcaatgtttaatttgataatttagtgtgtactgaactgtaaaagtagtacatttaagtatagctcaaagtacagatgttagaatcgtcctatactggaagaaatatatatatctctctctctttatgataatatatataatatataatgattatatataatatataaagatatatatgattatatgtctttgatcataaagtaaggaatatgctggaagaaatatatatatctttatgataataaatgattatatgtaggattataatatataatatataagataaaaagatataaatgattatatatatatctttatgataatatatatcattgattataaagtaagcaaaacacttttaagacccagtatttaaaattctcactattgatgtgtcaacatgcgtgtggataaataaaatcttagataaatgctttctacattaaagaacaatatcctttgcaatagtagtaaagattattcttaagaaatactgatgcttcatatcatattctatttaaaatattggtagaataatgaagtctcattaattcaggatttactaaatgagatattatgaatgtcattggctcagcatagcataaacattaggctacctaatgagaaacctgtttgccaagaaatttagtagcaaaaatgtcttcggatgacaatattaatttatgtaaggaaaagtcactttcaaggattctgatacatttatgcaagtaataacagctaataaacaacatatgatgtaataacaaataattacatacaacgtaataacaaattatatatgatgtcctatgcttttcgctttcctcatcctcataattgtttttgtaggtataatgagaggtaggaaacaactcagaaacagttgaaactatcatgagaaggtttttgtttgtttatttgtttgagacagggtctcactctgtcacccaggcaggagggccatggcatgaccacagctcactgcagcgtcaagctcctgggctcagttgatcctccacctcttaatagctgggactacaggcgtgtaccacctagcctggctagcttctaaaaaataatttatagaaacagggtctcactatgttgcccagactggtctcaaactccggggctcaagtaatcctcccaccttggcatcccaaaatgttaggattacaggcatgagccactgtgcccagccatactttcttattctctctttctgtctctccctctctccctccctctctccacctatccatctatcttggcagaacaaggtagaagtgctgccattaagcaggggaaaatatttacataaaatctaaagaaaattggtgtctatctcctcaaaagattaagctttagaatgtgtatatttgtttgactttgttaccttcatggaagccaaaaatggaaactttcttgctatgagaaaataagcagtcacttggaaataatttttgatttctcattttatataaacatttctacttttgttctaatttttttttgaatattcattttgagggcctaaacatttaaacagttttttcccagttaccattgctgcataacagagtaccgcaaaacttggtagcttaatgtgcagcagtcatttaattatatctcagagtatctgtgggttggtaattcaagaaaaattcaacaaaaattcagctgggcagttcagactcagaggctgacatatggttataggtaggcagtagctggtgctagaacagctggaaacaagctggatgtctctctgttttgctcaggttgtctcagctatgtggtctcttcatacaggctagtgtgggtttccttactgcatggtggccttaggagaatctgattgttgatacggtggctcaggggtccaagccaaagtgtttcagcttatatctcagcttcatcacctttaatgacctagcctcagaaagacattcactgccacttttaccacattctgttggttaaaagcaacttgccaattcacccagaataaaaaagagaggaattagactaccttttagaattgaaggttctagaagagactgtggaataaaagggacaagatatctttggaatatactgtttgctacacaatttttaagtaaatcagatacataatttatatgcaacatttttatgaacataatctaactcaagtttttttagtgcctctaaagcattttcccaagaaaatatggaaactgtctagattaccctgtaatagaactacaacagaaaatggaaaataggtcagggattacacatagatttataagcatgtaagatttattgaagacatatttcttcacaactgagattttaagaatgaaaaaatatgacctactctattatgaaaaccattatttaagccaaaatgagaatttcatgatgcctctcctcttacttaaaccttttctctgggcctatttgtcactagagcattgactggctcagttctttagatgaatttggtaaggataaaaaaaatagtgactgatgtctccaaatgcaactcctcaaaagcaagaagataaacacaacccattgaacttaacaaaatcatgtgtttgctaggattgatggagtgttagacaaaatgtttgaggtggtccttattatgccttgcattgcattatgtagctattatgggccatggaattcaacgatattgaaaagcagacaaaatacaggcataaattatttaaatgggcataccactcccacatttttaatgaaaggaagaataaaagcaaaatttaacaatatatatttattcatgatgggtatttatcattactttatgatgggtaaataatgaatagtcatttacccatcataaagtaaaacttaatatttatttaacattatttaatagtttaatatttatttatgatgggcatttatcattattttataatgggtaaatattaatttacccttataaagtaaaagggtattttgcatatatcaaccttaatttagtattttatcacacagggcaaagaaattgtgttcatatgtcctagattttattacatgttcactgcagtagactctgaacttattataaatatcgaggtatgggatattcattagcatacattcttaactcatggaaccagctgtaaatgttatttttggtcccagtgctttctcagtaaatccctttttctggagttacctacaatcctcatgcaaacacacttctaatattatgattgtggtttgtggttgtttactctgtatatgacatcttagacatttagactaaagagcaaatatctggaagttaagaaatcagaggtggggtatggactctgggattatcagtggttccaagtgagatgtgaatttggaagtcatcacctatggtggtgggacatgggcagtttgggggagggttcaagtagtactaagagtataggatttggcatgagctgttatcacataaaagttatccttattctcctgagagttagaattaggttatttgtgagtgagtgaggttatttgtcttaatggcttgcatgtgtatagatgtgtttaattttgtcagcaataacagatgacttggatgtgcatggtttgggggtaggtataaacaggaaaatttttgacagatatgggagacaaaactgccagcattagaacagttctacattcaggaaactgtttttttttttttttttttgagatagaatctcgctttgttacccaggctggagtgcagtggtgctgttcagcccacagcaacctctacctcccgggctcaaatgtgcctcagcctgctgagtagctgggattacaggcaagtgccaccacatctggctaattttttttttgtagttttagtagagataggttttcaccatgttggccaggttggtctggaattcctgacctcaggtgatccgcccgcctccccctcccaaagtgctgggattacaggcgtgagccaccacgcctgggcaggaaattctttttaaaagcatgaagatttaaggtttgggaaggatcatagatgttgtcctaaattttaaccttcctaagggtgattcttctggctgttaccctaaccttttaacagccatagcttttgaccccacagcctttttattgttgtataatacaacacttgcccagatctgcctttcctaacctatctcctttgttaaggaggcattgcatggttgaaaataaagctgactgctgggtgtaaatcctagctctaccacctacttattggatattcttcgataagtaacttaagagctctttgcctcagttgccatgtacataaaatgggaataacaatagtccttgcttatgaaggtatcatggaattaactgagataatgttgctggaataacagacgttggcacatgtactcaataaatattaactctggtcattgttattgttattatttgtagtggtattattccagccccttactttttccatggtccttcctattcctcctcctatgccttagactttctaagtagctcagttcttcataggtttgtctgactgggcatggctctctgcagggcagagtaaactgacttggcattttgcttgactttccaacattcaaatgtttaccactgtacccattttgcttagaacctttcctgacatgataagtatttatcaaggaatattattttatgatatctattctggaggctagattattaagaaaattagtatgtcctaaccttatatagggcaaaaataggggactggaattacaagaaaattcttacactgtgagtggaccaatataaagatttatgagttaagcaggaaacacacagctcagtgttttagataacacttaggattcatctaatcccattccttacccaactagaggcttttataacatgcatttattcagtcaatcattaatacttattaagaacctattttgtgccaagccttatgttaggcggtgaagatacatggtaagtaaagcagatttggaccttgccctgatggagcttacagtgaaatgggtgcagccaatattaatcaaataatcatgcaattatgtgataggtactgtgaagaaagcacctagggaaaaattagaataaatagcagggagaatgagtctaggttacagggagagggaatagttatagtggtcagagaggaaattagctgagattgaagattaaataggagctaactagttgaaaaaagaaatacgcattctaaggagaaggagaaagtgtgatgatgtatttgaagaactaaagaagaccatcgtggctggagccgagagagaggaacaggagtcagaaatgatgtaggagaggtaaatataggtaagaactaaatccatttcatccaatgcatttatcctattttccactcttgaaaatataaatgttccttgatttaggatgaggttgcatccccaaaaacccatcttaggtgaaaatattgtaagttgaaaatgcatttaatacacctaacttactgaacatcatatcttagcctagactaccttaaatatgcgcagaacacttttattagcctacagttgggtaaaatcatctggcaacacagtccactgtggagtgtgggttgtttaccctcctgatcacgtggttgactggatgctgtggctcactgctgttgcccagcctcacgaaagggtatagtgctgcatattactagcccagaaaaagatcagaagtcaaaatttgaagtatgacttttattgaacgtgattcacttttacaccataacaaagtctaaatattgtgttaataagccaaaccattataagttgaggactgtctacacaatggattgaagggagggcaagaaaagttagtaggagactattaggagagatgcttctcaaattttaatgttcctataaagcatctgggggtcttgttaaagtgcaaattctgatttagtacatcagatacgaagcctgagaatctgcctttctaacaagccctcagtgatgctggcgattcttgtcctgagatttcactctgagcaatgagtacctggatgaaactacactagtggtggtggagatggaaagggacagattcaagacagattagagaaacaaaagcaacagagcctattgaagaagaagatgagagccatggtgaaaagaggagatatcaaggacggtgtctgtatttcgggcttatacaactggctgtggatagtgctactcactccagaatgcttagggagtttaacatattctgtttcgtgcatgaacaaggaggctagtagtagggtagaattcttgagaaaagtggaaatggtttgaagttgctaccagggagtattgaagagaacatggattaagaaaatgtagaaagtttactatgaaattttgaagattggggattggagactagaaatcatagtattatcagtgggagaaagcataattttatccaacaaaacttagcaacccagaagtagagaatgtaatagttgaattagtgtaagatttaaatttttctgtgaatgttgaccaaagatagtgtatcattagagttatccatgttaatgagtgtcatgccagaacctattgacttcaatagggatggcaccatgtttgagaggccaaagaagggacccagagccggcaaccaaaacacagagtttatcgaggggacttacatacatggcagtccagtggcagtaggccgaacagaactgctaccatttgtaaaaaaaaaaaaaaaaaaaaaaaaaatgcagtttatatagcatttttgcagtaggctgaacagaactgctactgcttgttaaaaaaaatgcagtttatatagcatttttgcagtagggaacagaactgctaccacttatttaaaaaaatgcagtttatataccattttcacttagcatcctccccctagcaacctctacctggcaaccttcatttaacccaaaacaaagggccttgattccctctatagcctgtgttccatgggatgggccgggatttagatgttcctgataaataaggaatgaatctctgggttggccactcccagattctttagcttggattctgaacacacattctttttataccatggagtcattctccgcatatgcttaagttaaactcttgctatcaggtacatctgccgtacattccaccccagcataccctcgaatggacctcacattcttttcatgtcattcttccactatttccctggggccaggtatataaagaggagcattgcagtcagacattgcagcagcaatacaaactacaacaacagaaaaaaataacgtatataataatagtcttagaaagttttgtcaagtgttggggaattgattaaaccacatggttatagggctgcaagacagagattctatagcaggaatatgtatacctagggcctgcatggcttgggttacattgcgagagtaaatcagtgatagatatatcacatttggtgttaattattgctcaggttccacctgggcggcagttaagatgtccagggccatgtgattttgctaagaatggtgcacatcccactacctgtatctgctctgccattatccaccctgtcccatcatgtacagcctaccccacagtgggggtaacattaacttgcttccatactaggaggaaaatatgttgtctcatcttgttgatggtgggaaactcactacacgaggtgcaattgtcactaaagggaaatagatgagggtcattatactaagtacagaagtggctccaggtactcaggtgaggtgcttggagcaggcctgtgatggaagagagtggcagctctctgcagtcacaacagtctgtttgttatagggagagaccagcatctgtgctcagtcggtgaagaggtttgctgcacaccacaccgtctatgggtggacggggagatgtttagtgggtacaagaaagggcaagtcatggccatttaacaagacacaagaagttctgtcattttgagaccaacaccactggtagcagcctggtgcctggattacaataccaaatggactggcccccgctcttcagcacatggtaggaggacagaataagacaatggaagtattaaaatgttccgtaatgggaggatgacagtcctcttgcacaagggaggactaacattcattattttaatcgtacgacggggagtaggatgtaaaatagatgtgatctgtatattctgttctaggcccttcctccatggagtggaagtaccatacgattggggaatggtttgctatttccagggccatttaatgatgtgctcctgggtaggtagtcctgtggcaagggcaatagaggtttccttgagtcccaggttggggcaaaggtatactgtccctcaaactgtctacctggatcccaagggtggcatctagtccttgtgtcaggagagtgtaagcgctggggtgatgagacatgcatgttcatccagggtacaagtagctgctggtaagtggcatgtccatccacagagccagagaacacatcttctccggagtcgttgcatcaacagtccgttcatccattcaatcagccccactgctgtaggattgtgtggcaggtggaaatgtcagtgaatatccagggcctccatccattcctgcactttgtgtctggtaaagtgtgagccctggttactgttgaaatccgtggggatgccgtaggtcacacacagctgcactagtcctactatggtacttttctgtgtggcatgcttgctgggatatgcctgcagtagctctgtgcaggtgtacacacaagtcaaggcatagcaatcaggtagaggcaaaggttctaggtagtctccctgccactgttgcactgggctctggccccaagtgatctgtgcctatcatgtggcaagggcctggaggcctccctgtgcacaagtagaacattactgtcagacacctactatgtttttatttagtagtagcaggccccagttcttcactgtggctcaaagggtacattgtccccagtgtcatcttatgtagccaatgggccacgtcttctgtgggaacttcctcaagaagacatatgcaggctagctcatctgcctgttgatttccaggtggtgtagatgcagtgtgggcatcctcatggtagactgttatatgcatgccctggatataatggggaatgtccttccatgtgtcagcaccccaaagggggtgccctactaccattcagttttacaatcctgagcttcctattgcagtggccacctggtgagtcccttaaaggaggcctataccttacccataatggcagacagaacaacattagtcttactgaccaagtgaaacagcaaggtgggggctgcagtttgtaagctggaaaaagactcagaagttagcatgatgtcatcagtgtaacagaaacacatacccgctcagggtggttcatccgctgagatctgtggccactaggctaagacagatagtagggactatgtaaatattcctggggcaagatgataaaggttcattgttctccttcccaggtgaatgcaaattggtcttcactctctggggcaagggggatgctgaagaaggcattggctaaatctacaacaaaatggtatgtgccaaacgcctctcttatcatcagatgggaggcagtattggaaacagctgcatacattgcagagaccaccttatttaattcccagtaatctactattgttctccatgtcccatcaggcttccacaggggccatacagggctgttttgtttggggtatgttctggccctataatgcctaaattcttaacaatccttgtgattccatcatgccccctcacctgcctggcagtgagtattggtattgtttcagtgccactcttcaccatgggactggcagctgtactacagtgtccatttcacatttccctgaatcccatgcttcaccatcctaactctcacttgaattcccaggcccattgtttagagagtcagacttgataagttatcaatttccaagaggtattccaagatgagagccatgtatactaaatatggttttggtagcggtcttcccacttacaatgctagttgaacctgttgatcacagccaccctccctaaccatctattgctattataggcccttggaactgatgatgaaggtcaccatgtgtgagagtgcatttggctcttgtattagtctgttttcacattgctataaaggtactacctaagactgggtaatttataaaggaaacaggttttattgactcatagttccacatggctggggagggtggaaggcaaagaagaagcaagtactttcttcacaaggcagcaggagagaggagagcatgtgaaggaggaattgtcaaacactcactatcaagagaacagcgtgggggaaaccacccctgtgatccaatcacctcctaccaggtccctccctcgacatgtggggattctaggggttacagtttgagatgagatttgggtggggacacagagccaaaccatatcagcttcagtatccagtaagggcatgcacaatctgcctattcttaggtgaccaatatgtagctagttccacctgtggcctctgacccctggacaccctggcaaccactgctcttattgagattctggagccttggccttcatcctagtctaacgggttggtgcctgctattcctctgcagaaggggtagtgggctgaacttgaggctccttagcgatccactgttctggcttgagcttctgccccagtctgaccagaaaagcattaggctgtttatctattttctcagcaggtgtccctgccactaccaggtcataacacatttgttgccagaccaccctggtggatcctttagctgtctcctttcctttggctcctttgtctttcttgctggcagcgcataccctgtgcctatgcagtttctccatttcccctaagttgggggctgcttgggctgcccaagacactggctgtcctaccagggcacttaggatagacactggtgaactatactattggttgggtgccaactaagatagtgtctttcatgctggcagtgaaaagctcattggagcttggtaatgcccagcatagatagcatgcttcatctctaattcttgggggatgtcctgcaattcctccatagtctgtaattacaaaggagatgtgaggatgttgctctcatttagccaggcttccttgcagcccacagccactcagctaagagggggatggctggtcctcattattggcatcatagaggtgcttcctcagggccaggtggtttgtgatggatgccattttaactcatcttgagtctggagagtataatactctccgcccccatgtcccatagatggagaagccaccacaatagactctcttcccttcttcctgaacctatttcgcagctccactaattccacgggcgtgcagtactgcattgtagtgtgctgccgtcttttagatgcgggcaagtcttatggggttaccccctgtaagtgcagctgatcagcttttatcttgatggtgactactggatgtgcagctaggacaggaacctttatgggctcatctcacccctctcttttctccccactgatagcacatcatgggggtcccaggtatcttggggtcccaggatgatttagtcataatagccctaactcattgctgtgggggtcagcaacccttcaaacaggctacccaacaagccagggtctccattttgtcatcccgtgtccataggtgagacagcaaggtctctgatgtttcagcctgagctaatctggcatctctttctagtcatagctcatcttgtaactgaccaatccccacctatgctgcaagctcagcttcagtgactgctcagagtgcagtcagaaacagccagtgaaccacagttgccactactcaggcatctgacccttgctcagtcagtttcaacccctgtaacagctctttctgaaccttcagtgttttcagggcatccctgtactcatgcggtgggaaccaaccatcaaggacagcagctgttgtccttgatggatggaaagcaggcagagacagagacccacatagacatggatggccagcccaggatttgccccatggatttccccttccccaatcccatcatcttgatgctcataggattttctttgatgccctagttgtcatgtcaattgttatgccaaacccctattgacttcaaatagggatggcaccatggtcaagaggacccagtgtttattgaggggacttacatacaggggactccagtggcagtgagctggacaggagaactgctaccgcttgtaaaaaacatgcaagtttatatggcattttcacttagcatcctctccctagcaaaacctctacaaaaacctctacctggcaaccttcatttaacccaaaaaggggacttgatcccttgtacagactgaattccatgggatcaaccgaggtctggtattccccgtaaataagaaatgagtctctgggttggccacttccagatttctctgcttggaattgcaaacacacattctttttataccatagggccattcttagggttaacctattgctttcaggagcatctgctgtacaatgaaagaatgctggaggtagggactaaaaggaggattaggaatcaatagataaggagaaaggggacagagagagggaagaacatgatctgtttcagtggtcaccaaactatagcctgtgtgccaaactcaactcactgcttatgtatgtacatcaagtttattggaacagacttgcctattggtttagtattcatcctctgtggctgcttttgcactagaatggcagaattgagtagttgcaacaataggttggcaaagcctaagatatttgctctctgatctgttatagacaaagtgtgctaacccttggtcggtttcatcttcttcatttctcttactgaggtcaaagaacatacataatgtctaagggaaaagaataggaagatgaggtaaaatagaaaagagcaaaagtttctaggggttaccacagcccagggtgatctagagaatagacaggtgaggtgaagttgagtctctgaaattcctcaaatttttcttcaataaaggacctgagagtatgaaatgggctgcccatgtggatgttgaaatcatgtaggatactgatggttttgtgggtggtgagaaagatggtgaacccaacaccaaagtcttggaaacaaatgtttggtaagtctttggaaaccagaaacaaggaaggatggaagaagatatggcctgttaacataaactgtgtttacagacagagtgagaactagtagtcctaaggtataattgaggagcaatgaggacaggaacccactcctagcccagagatgagtggtactcattgagaggggcccaggagagcaatgccttcagagatctaggcttcctttggggcaggaagtgaaggaagacttaagggcagagatggaggatagtagggagtttttttgtcttattttctatggaatgagaattctgaaacaaaaaaaaatagatttatgaatgagataccttccatgggtttaggccaggggaaaaaaagggggcagagcagtataggtatgagaatacaggaaagaatagatagcagggtgtgcttctgtatggaggtgaccaagtgttagatagctgcaagtattctaaggaattggcaccaaggattgtctggtgggcacagaggaatagtctggttttataaaaacactgtactcaaaaatgcctggagggattgtaccatatggtaatcccagccagctgagcaggcaggccatgatattagttaattcctacaattctaagttggtgttacacattgacaacagatcctggtggagaagaaactttggcatcttcagagtacctttggccctggcatctgctcattggtcaataactctaccaaacacatagctgctcaagctggaaatcttacaatcacctgtacctccagtctaccttcttcatttctttatatttcatcttcacattctccctggattcactgtcatggtgtcttagtaggcctttcttctttagcctaatctcccagaggtgtttccttttgttactctccaaaatgaaaagtctatttttttcttatcaaagccatacatgcttcctgtaaaatcaactcagataacacagaaggtataataaagaatgcaaaattatcacaaatcctacatcctagagttactactattaacatttttctatatgtctttacagactttctctatgcagatacattttttaaaaatgtagtggaaccgtattatatgagcactttcttaaaatttattattttctaacagtggattatcaaactctttcaataaatatttatatcatttttaaagccaacagtattctggtatagggctttatcatgatttattatccaattccatatcactggatttggtttatatttatttgctactatatgtaacaatataatgaacattcttatactaatgacttttataaaacaaaaatctgatcatgtcatagtttcttgctcgaaattcatcagtgtctctctagcctgtgacttttgggattaaattcaatcacttagcatgacagaaaaggtcatttatcatctgacttggtctgtttctagcctgatttctcaatacacctccacacctgctactgtggtcaggagccctgcttaagtgcccattaatacctccatcatgaggcattatcaatgtgtgtttacaacttcccagctgcactgtaaactctttaagggactatgtattttatctctgagaatagttatatgtgggcactcaatatttgtttggttgcaagaaaggcaatgaatgcatgcacacatgtgtattttattccttatttctcattctccttccctggaggtattttaaccagtactgtcttttttattatagattatgttttcttgtaatcttgaatttgctcattctttagttcattccatttaacaaaagcagatcgagcacctactatatgccagacactgttataggtattggaaagcagtgaacaaaaccttctggacctgacattttaatggggagacagacaatatacaaggtaaataaatgacatatatactatgttaaagagtggtgagtactaaggaaagaaaattaaggaagagggttttgaagtgcgtgtatgttgaaagagtggggttgatagttaagacaggctgggagggcaagtctgtttccttaagggaggaagctagtcatgtagtttctggggaagtgcattctaagctgagaaaagagtttaggtgctaaggtcttgaggcaggtgcatatcagataggttggaggagtagcaaagaggctagtggtgctgcttcagagagaactagagggcgagtagatgaagtcagagtgcagacagcaagccagatggctatagcattgttagaactttggcctttgccctggctaaaaagaagagccaaggttataacataactttctttttaacagaatcttcctggctactgtgttgaaaagaggctgaaggtgaacagttaggctgttgcaatcattcagacagaagtttttgttgtcagaaccaagatggtggcagtgagagtgacagtgaatgactgaattgtggattccttttgaagatgtttgtttatgatactgacacgggatgcgggagaaagagcagaatcacagataacaccaagagtctccatccctcaaaacttaaaaacaataaaaattctatttaccgagcaattacttatttttgctccattggcctaatttcagactcatacttaaccaatcttaactatatttaatggaaattgtcccataaagaactctgtttttgaatacttttgtttttgtttatgtggtgtcactgtaacctgtggagactattttggctatgtgtatcttacaggaaccagtctcattatttgataagcatatcacatacaatacccaaatctagttttgatatttgtcataaaatgtcttggaccatggtgctctagtaatacaattttcctgaattttgtaactgcacttgtttagcacgtggatcgcttttcaataaacgagtccagatgactctaaatgaatttattgataaagcaagcctgccttttactcacaaattttctagtgactatattaataatattaatagctataaattgaaataaagtacgtacaataatcattgttttctattttgattaaattactttaagcaatcacagaattgcaagttttaaaatacagagtaatattaatagattttcactagcatgtattttaaaataatttgggtatgatttatttagaaatacaagatgaaaatcatctttttttaaaattatctaaatgttaaaataccctgaaaacatttttttattatactttaagttttagggtacatgtgcacaacgtgcaggtttgttacatatgtatacatcttaattcaaggaatgtcactttaaaaaaaaatgaaaacgtgaaaagtcttttgaagcagcaatctggtctctttgggcactgctagatacaacgggtatttgtctgctttcactcacattccttagctgaggattcatctctgggaggcttaggatggaacagacagtttatacttggattggtgcccattcctttccacgggatacctttatatgtggaagagctagagatgtacctattttctaggtgtgacagaatggcttccagtggattttcaaattttggctttaaaaacattgttgagatgccagttactgaattgaaatgtccaaggtacccagcaaaggcacctgaggtggcagaaatctcaggcatgactaacaaatgccaggcatttctgaggaacaatatgcatgctgttcacttctttagaatatttaaaaaatgatgaaataaaaaatgaaaataactcacgtgtggaaaataatactgacattttaaactgatgcttaagagtgtgatctggcatttctatgattttggacaatgtcggggtgaacttgggtaagcttcttaatatcttttttgctttctttacactgtatattaaatatgaataataattgtttctactacacaagattgttgtgaagatgaacagtttagtttctagcacactgtaaattctcagtagtcattagttattattgtctaagaatacaatggaactcttgagtttacctataaattgcatcttaagaagaatgtgtagaaagatgagaaacagagaaagaaaatagctccggggaatccttaccctggctatttttagtggattgttttatattcatcactgggtgatattcttgccagaagccaggtggggaggatgtctaaccttcatatgagactttcaaagtgtatgacttataaaagtttctatcaatgttaacaaaatattagacaattaatagtggtttgtattgtaacgatttttagttctgaaaaataaacatgatatagatgataccaatgagtgtttttttgttttgtttttgtttttgttttgtttttttgaaatggagtcttgctctgtcgcccaggctggagtgcagtggcacgatctcggctcactgcaagctccgccttcccggtcaagagattctcttgcctcagcctcccgagtagctgcgactacaagcgcgtgccaccatgtgcgactaatttttttgtatttttagtagggacggggtttcaccgtgttaaccaggatggtctcaatctcttgtcctcgtgatccgcctgcctcagccttccaaagcgttgggattacaggtgtgagccaccgggcctggccaataccaatgagctttattgtaaaaatggcactcatgatttactctgaaaattgggacacattgtctctgctttatcatttccaccattcttgaaactgaatttattcagcattccacaaagacgaattgtctttctttgctatagcactctactctctatcatcatctctgagtgtctccaggttctttaggtaaagatatataatctgaagatcaaaagatgacattaaagagagcaacattaaagaaagcaacatttactcaagaccagggagcccctggcacatagcatattgatgtggcagtttggatttaagaataaggatgcaaaacctagagtgaatgaatatggtatatactcaggcattggaaaagttagatggaaaggattccataccatacgagcgatggaatgtggatccagtggaataaacgtgacctgtgaggacacagtcagcaatttgttcataatacaagggtacattttgaagtcatgggctgcagaacttgaggagttagtacagagaaggatcatttaagacagatagatatatgctcccttccattcagggaaagtcatttgcataaggtgctttttggaggcttttttgatgaaaatggtaacttttttttttggcaagatctgttttgtttgtgtgtgtgtgtgtgtgtttttctgtttgtgtatgttttgaaaaacatgttatttaaattttctcctcaatgaagagagcagggaatggggaattgttatttaatggagtgagttacagtttgagaaaatgaaaaagttctgaaggtgagtggtgtcgatgattgtataacaatctgacatttatgagcaactctttcttcctcgtttatttcttaagttagtttttactgccaattattgaatttccctgttcatacaccatttctggtattcatctactcacaaatatatgccatcaaccgccaacagaggatacgtgatatggaagtatagatgaactcatataaatatatagccacctttagggaaattacacaagaaacctccctgctcaagtggatcagggttgtcatgtgggtatcatgtcaagtggatcagggtgtcatgtactgtttatagccacaccccctacatatattctgcatcttttgttgaaagcaggaattatccaatcaaataagaaattattctttactatttacatatttaataattgtgtagtgaaaaacccaaaatatataactgctctgtaacatccacaattatgtctacaaatggcgtgtgtcactagtgccagcaatatttcaacaaatgactatgttaaatcattgtttctaaagtgcaaaacagaaatactagagccctttgaggatttctgcttgagtgttattccagcttatgagtgtatgttttgagtgtatgttatttaaattttctcctcaatgaagagagcagggaatgcagaaatattatttaatggagtgagtttcagtttgagaaaatgaaaaagttctagaagtgaatggtggtgatgattgtataacaatatgaatatacttaatgccattgcactgtacatttaaaaatggttaaaatggtaaattttatatatatatattttaacacaaaatttttaattgtctcccaaagagctttccagcatatttataacattatttgataatatcattttccttgaaatgactttaaatccaatatgaatatgcaagtaaaaaatgcattaacaaaaaacatttgtcaaacttcaatagtgaaattatttaaataaactggtcttggtattgagaagaaaaacactaaagcattagttagctgggatcagaagatgatcttttgattttattcttatcttcatgaacttgtagtttaatgtaatggttgctagcttgactgcaaagtttagagatgactttttattgactttagtcagagaaggagattattcaataaaaaccataaacattaaacttctgatatctggaagttgtattagattgaatttctggtattatgtgcagaataaagtgcttttattatgatcactcctcttttcaactctatatatttccagtttaatggcataataacagtatgactgggatttaccagccagagttataaatatgtaacattcatttctaggtaatatattacacaattcttttatgaagaagtagttgcccttgatttaaaaatggatatttgatttgaataaatgatgctggaatttatgggatactctaagttattctgccctttcagatgctgaaatgcttttttgagatgtcagagttggataaataataattgccttctagaatcttcagtataattatggttattttaaaacccaatttaaaacctttgtgatagaaataatttttaccatacctattgctttaaccgtgttttactgaaagatagctagctgtgtattctaatatcaaactatgtttccttctgaaaggactcactaaaaactatcttttgtatatgtaaatggttatctggttagcatgttctttttttttttaattatactttaagttctacagtacatgtgcacaacgtgcaggtttgttacatgtgccatgttggtgtgctgcacccattaactcgtcatttacattaggtatatctcctaatgctatccctcccccctcactccactccacgacaggccctggtgtatgatgttccccaccctgtgtccaagtgttctcattgttcaattcccacctatgagtgagaacatgcggtgtttggttttctgtccttgcaatagtttgctgagaatgatggtttccagcttcatccatgtccctacaaaggacatgaactcatccttttttatggctgcatagtattccatggtgtatatgtgccacattttcttaatccagtctatcaagcatgttctttttaatgatttcattccttacagaattcaactgtacaattcccacatttacaaatttcgtttccatttaccaaaaaaaaggaaaagagcacatcctttcttttgattaggatcatcttaaaacaagtagggatcagatagcacaggcagggatcttccattctaatctccagttggactgtggagaaagccaaaagccttagcttactgtattagtccattctcacattgctataagaactgcccgagactgtgtaatttataaaggaaaaaggtttaactgactcacagttcagcatggctgggtaagcctcaggaaactcacaatcacagtggaaggcgaaggggaaacaaggcatcttcttcccaaggcagcaggaaggagaagtgcatgacagcacaggaaaaactaccatttataaaaccatcagatctcatgagagttcactcactatcatgagaacagcagtggggagacagcccgcataatccaatcactttccatcaggttcctcccttaacacctggggaatacaattcaagaggaggtttgggtgggaacacaaaacagtcatagtcagatggacataggtagtggaccgagtatgaattttacttcacaaaatcagttgtccaaaacaaaaaaggcacatatgcttattttcgtaagcaaaattaaatcagacttcaaggggtggggacacttaatcctaattaactggaggctcccacacaccccgaagatctctggaaaataccaaattcttacacagagaaactagggaatgggaatgttgttttggtctttgattatcactggtccttgctgtgagcttctgtctgtgaccatgccaagcttcggcattgtggttcgactattgttgtccctttccttctttacggggctgaattaagaatggtagatggtcccagcattgagaatattataattaacataagagtcatactaagctttccaaacctagtatatcaatgttgagttctgttggatttcaggtagtgatatataatacgtatgttgatatgaaaatagcttccttctatagtttttttaaatgcaaagttcttgaaaagtttattaaaaccaaacctggatttgtgtgtactctaagcacatgcttaagctacctgttaggtgggccagtgctgctcataggtgtattaaaagtagcctaggggctactgtgcatgggagtatcactaagtgactacaaattatttcttcttatttgaagacattttcctagccatttcattaggatatattgttttacttgtgctttcaaaacagtattagtatagctattagaactgatcaggctttctcaccaccagtccttctccagaagagtggaaagtagttggtcagacacttgggtgaggttagaggtgagtcaaaatgcatccaaatttgcctaggatgcaaaaaaaaaaaaaaaaaaaaaaagtcccagtttgtacctagtgtcccagtataatttcttttctttttaaacatatttagtgaaatataatgtatgtgacatacaattttgtgttttttagtatattcacagatacatacgatcatcaccacagtaagttttacaatattttcataacctcaaaaagaaaccctgtacccttgacctaccacctgcttatcccctgtctccactccccacaacaccttcaatgctaaggaaacactgatctttctgtctctatagattttcctattctggactttcatataaatggattaatacagtgtctggtctttcgtgactgacttctttcatttagcgtaaggcttttaagacctagccatgttgtggcacgtatccacacaccattcctttttatggctgaatactattccattgtatacatataccacattttgtatacatatgccacattttgtttattcacttgtctgttgattgacatttgggttgtttccacattttggctgttatgaacaatgccgctgtaaacaattgcatacaagcttttgtgtgtgtctgtggctgcatcattttgcattcacagtagtactgcatgagggttccaattctctatgttctcatgaaaacttattatttgacttattaattctgggcatctgggtgtaaagtgatatctcattgtggttttcatttgtatttccctaatgactaaccaggtcaaacatttttaaaatgtgctttttggccttttatatatcttccttggggaaatatctgtttaaatctctctcccattttccaattgtactttttggtttttttattcttgagttataataaatatataatacctttatatattctagaaacaagtttctttcagttatataatttaaatatattttttcccattctgtgagttgtcttttcactttcttgatggtgtcatttgaggcacaacattgtttagttttgatgaagtccagtttatctatttttttcttttgttgctcatatttttggtatcatatctaaaaatcctttaccaaattcaaactggttgtgtggtaaattatatggtcaccctaattagcagtgcagtcaatgaagtacagtaaaactccctgatctatgatgatatcataactctagttgtaatctcaagagcatcatactctaatgtggtttaccaactcaaattaaccacatataaaagtaagagtcatatgacactaaggaaatatagagaaaaccatttttataatagatagaatgcatcagagggtaagaagagaaaccaaagctcacagacgtcctccttcttctttttcttctcctcctcctcctcctcctcctcctcctcctcttctttcttttttcttttttcttttttgagatggagtctcactctgtcacccaggctggagtgcagtggtgcaatctcggctcactgcaacctccacctcccaggttcaagagattctcctgcctcagcctcccgagtagctgggactacaggcccacaccatcacactggctaatttttgtattttttagtagagatggggttttgccatgttggccaggctggtcttgaactcctgacctcaaatgatctgcctaccttgacctcccaaattgctgggattacaggcatgagccacattgcccagcccagatgtcttctttcaaaagcctataactatactttaaagcctcaaagtccaatcccttttttattcctagaatattgtattcaatttttgctgttgaaacagtgtggctatgtgtcaacatgctcagtagggtgtctattaactttaaaatgtcagtttaaaggcaattttgtattttctcttaagtaatttaaatatattttacaagtgaatttcataatttgctggaattagtgactaatagttacacagctagctttagtgatataaattcgcagtcaaaaaaaaaaaaaaagcttaatgcagctaagctgagggctattccaaattctagatgtgtcatctctctaccagttctaaggatatcagcttcattgtcctaactgtataactccactgaatgaattacagtattgaagtttagacctgataaacaatctacatggctatgaattggttatcaggtcaacttagttatgagttaacgatggcatgtggtaaactcctgtttagaatttaatgacaataataaatttaaatatttaagaagtgtttccccatttctaacatatagtttaaaacagataaagttctatatttgaagataaatgagtctattaatcattgtattagtattttcaggcttcatataaaattgggtcacatacttttgatgacattgctctgattgtaagaaaaaaatgtgtttttatttttgattctgcaaacttgagttatttaaggatttagtctagagcagaattctttttctgtcttttggtataaaatccaaagattaatattacaatcagacaaacatctgattatttcacatttgcttgactttgtcccctggggctgaaggagatggagggaccaaatgtgtaatttaccaagacaggcagttattgctttcttggttctgtcaatctgttcgtacctgtgattatttcataaaaagtattttgaatgatgttacatgtttatcagtttcaggaacagctctctggagcaggacaccaatgtcaaaaaaacgtagccaatgaaactctggatttttttaattagttatcgaactctaagaactttgaaattatgtttttaagttattctttaaacatttctgtgtcagaaataattcattattgcattattctctccatttttatattgggtctatttatttggccctgtcagacagccagtaggaatagaagatcataattcatatttctctattcatatatttagagaatagtgttacagatattgagacatggtggccatgtttctgcccccttctcccttcagtcattcagcatcccacctgattaactaaaagagtataactcacaaaaggaacatgtgtggtgggttagatgagaattgctaacataagtgagcctctcttctttaaatgagtgtgcgttatcctgacagttggtagaaacaaggttaggagccattgctcctgggataggctaataaatatggaccaaattaaacacttctgatctcttagaaaaatatgaaaaaattgtgcctgactagagttgttctaaatcagtgcttctcaaacttaaaaaggcaagctctgatttaatagttcttgagtgaagtccaagattgcattttctaacaaacttccaggagatagacactgctggtgcagggaccacaccgagtagccagggtctatgaggtccaggtttgcagtggtccccttagggtactggagttgaaaggtgaaatgacagggcctgctgcaggaggaggcaagtacttgctcctgtgaacagaaggggcaaggaggaagctccagcaagcactgagggagaggcactaaccatggaagagtgatgagtcagaatccctgcaaaatcttcaccaatgagagcagacttcttttgagagatggtctctcagaaagttgctaatatttggagaggtaaatgagaaacattatttacacagtggcatgaaagacaactttagcaaccagcttctgagtgaaatacaggaaattggcatatcaaagtgcagtaatacatgtgaaagcactttgtgaaacgtaaagtgctactcaaatatagggcacttatcattaatctaatagccttgggcaaatcaactgacatggggttggggaggtcacatcaagattatctataagggatactgagggaaacggggatttggagcagtaatgaacagctagttttaaagtccacgtagagaatggaggagtgggaaggatacatgtggtgacaagatcttttgcttggggaagaactggaaccagggagctataagggaccttaaatgtctcttgaggcagatcccacactttatatgtgagcaaactgaggtccaggaaagctaaattatgtgcacaaaatgactcagcaagtggggagcagagcagtgacccaccccttcagcacttggagatagagagcagaatgatgggtcaccagaggccaggggtagaggggtaagaagggatgtggtgagtgggtacacaaatacagttagatagaaggaataagatctagtgtttggtagtacaataaggtgactatggttaataataatttattgcatatttcaaaataactaaaagagtggaattggaatgttcctaccacaaagatataataaatgcttgaggagatggatacccaagttagcctgatttgatcattacacattgtatgcttgcattaaaatatcacatgtataccataaatatgtacaactattatgtattcataataattttaaaaatatttttttaaaaaaataaaacattttaaaaacaataagatacccagttaaacttgaatttcagataaacaaaaataatttttagtttaaatgtgtccaatgaacacctctcataaggcccagtatatgtgatatactgaaaaattacttgtttttgctctgaaattcacatttagttggacatcctatattttacctggcaatactagactcattgaaacttcagtactttttagtaagtagagatatgcgatgaggaaaataaatttcttgagctgctattcaccttgtatttaggatacaactttcatcaggatgtgaggttctgtgtgtttttgttcctcggagtttctccagtatctagatcactcatagcatttggtaaatatttattgaatgagacagtgaaatggtaatggttaaaatattgtggcatgcaggatgcttaacataataaacaacagaactgacatttagatatttcttcttaaagaatattctctggggctcatatttcattttttttatcagagcagatcttgggtgaacttctcaagaatgttcactgtaacataaatgatacaaaggatagattttgaaaatgaacttttgagttcgttttcatagggtttgaaagttctggatgactagtttattagaattacaagattaattcttaggactttaattgattaataacctaaggatttaagatgtggcatatagcacaaatcaatgtgatttgggatgtatttctaaaaagaaaaaacaaaacagttcagaactcatttttcaccaaagggaaacatgacagaggtgctgatagctggagccttgtcactgcctccctgccagcaaggtaggtgcagatggagtagatcagagtcatcttcaccttcctctagatctaaatcagtgttcaggaaactgatcgagtgcacccagattcaagcacctttgataaaaccataatcttgtaagaattcttaaactgagacttgtggcagaaaaggatttggtgaagtgcacgaataattacaactgtcatttgttaaggatttactgtgagcaagcatgatttcatttaatttcataagactcctgcgaagaaggtgtgaccccatatttcagatgagaaaactgaggcatagaaaaatgaagtgacttgacatagtaagtggtgaaaatggaatttgaccctaagtttctttctatgctacaacactgcatatcaactaattcttagaataatacagtcctgcaaaatattgccttatttttaaaaaatcagcaattgaacacaattacaattggcccttgaacagcatgattttgaactgcatagtccacttatacatggctttttccaaccaaatgcagatcaaaatacagtattaatgggatataaaacctgcatatgaggaggaccaactttccttatatacaagttctgcagggccaactgtgagacttgagtatgcacagacgtgaatggtcctggaagcaatcccctatttatactgagggactactgtacaattagatcacttttccgtgaagctagctccgagttcacatgaagataataagcatcctctaacccaaggtcatcagtccagtatctcagttctctctcttttttttcccctctgtcatctctaggaaggcgacacactccctctgcattttctcattgtgccgttatcatcttacctgggtctatcagctggtgcctgggcaagcaacagatggtatattcaaatagagtaattgaagagagtttaatgaagttaatattttctaaggtatgggcagagttaggagaaccaatggaagagtgaagaaccagagactagcaatgctggaatcaattattgttcctagactctgacgttactagaagacaaagagagctttagctataggagagagaaaaccaacaggtaaggagctgctgtcttccaggaaaggatacagctaattcattgacatcaggaaagtgtagaaccaaagtctgggataaaaacaaataaacacacacacacacacacacacacacacacacacacacacacatgcccctgccctcacgctcttcttcatgtagtcttgtcttttgctggtggctaacattaatggaactcaatgagaaaccagagcagaaaggaggcactgatgtagtcagtctcctgggcacagtgcagggtgaggaatggggaatattcgatctagaagggcaaatggaaaatatccattgcatagagcttcactgccatggtcctgtagaccaataagcttaccttcctttctcctacactcttgttttccatgttcccttccttttctctcccaagttctctctcctgcagttgtccctccatgcgctgctctgcacgagggccattagtgctctgtccttcacttaagtgatgttagcccaatactggactgagtgtccacaaagcttcaggttctttccaactctgttcttaagtccatgcagagatgcatatgcatatgctgtggcagttctcactaggagccccctccaccatcacctaattccttggttctcggcttttacccgtaaagcttttcttccttgtcataaccattggcagactgtttatctgcctcagcataccctagagtgttagagtcctaaaggtgtttccctccaatagccacactcctaggaaattaagtagactctgtctccatggcagtcctgatttcctacatttcattttaaaactacatttattttattatgcactgaagtattattgacacatcatcctctaaatatagatctcactgcggttagaggcaatgtcatacacttctgctcatcaccaaaagcccaggaagagttctcttcccatacaaatattcaacatatttctttaggttgattgttacaataaatgcaagaattcagaatgataatatatttttaaaacctagtctttttaaataattgacgataaaattgtatgtatttatcatggttaccagggtctagggcaattggtaggggttgggaagatgttggtcaaagtatacaaaatttcagttacagaggaggagtacattcaagagatctattgtacaacatggtaactataattaataacaatgtattgtatcctcaaaaaatgctagagggtcgatattaagtgtcctgtgacatttctgtcccaggaacagtggaagtccctctgcctttaacttattgcccagtagtatccaggacacatttggcacagcctcagagcattggcactcaaaggagatagttcaacaatgaaaggcttgtctttcttctttctttctgtttttgttgttgttgttgttgttgttgttgttttgcagggggacagggtggggttgtggggtggtctcactttgttgcccaggctggtcttgaacttctgggctcaagagatcctctcgcctcagcctcccaagtagctgggatttcagatgggcactactgctcctggaagctctttttaaaaataaaggtttttacttactttccttgaatattctgaaaaggatccataaccccccactccaaactttgtacttccctaaacttctgtgtacatcccttaaatccttaggcatcttttctctaattgtccccaagccccttccccacctctaactcatatacctgctttctttctactcttccctctttctttcatttctagaccacagaagtcctggagaacttgccaggcaacaaaaccctccttgagggtagaaaagggacagaaactgagctggcagagtcagagtcccagtttgtagctagaggattagaaagaccaccctaatgttcaaaccaaatctatggggtagatggtactatctccagcttataaatgaagaagttgaaatacagagccatgatttgaactaattatgactccagtatgtgccattttcatgaataatagcaatatagtagcttctagtaattgaacaaatactttcactagtcctgtgctatcatgcatgtttcattttaaattttcacataaaccccatgaggtagtagtattgttactactattttatgcatgaagatactaaggtatggaaaaattttgacactttgttggccacacagatggtgtgcttcagagccacaacttgaactaaggcctatcttactccagatctgactccaaatcactgctcaatgttcccatgatacccgctttatgatattacatactaggaacatagggataatatagtagctcctttttcatcccctggataattctagataattcactggggttgggggatatttttaagaggtgagaaaaaatcagtgtggtaggtcctactgagctatagcttgaagtaatgcaagccagttagtcatacaacaaagtccatgcccataattgaaatagagaaatttggagtttataatgtgaatgaagagaatcagaaatagcagatgagtctgtggacctggaactagaagaaaaattacaaaatgtagattcctcaagttgatgtttatcagttagcccattctcagatttggaagaggttgaagattcacaatattcctttaaagatcatctagtaatagtcgtcttccccctggagagtttcccagttgtgtggatcatttcctccatgattggctcctgttttgtgctggactgcactcaagcacccatgggtattcttgacagctcttagtcacaccaaataatatcagagtagaaggtaaggaagtatactgcattcagttgaaaatatggctgtgataattttgtggaagatgagtcatgacactgaaattagcctactaattctgaagtgaataaaatatgaagatattttgaaaaaaaaaaaaacagtacaaattttggctaggctagtcagttacctcgagagaattgacacacacacaaaagttgtgaaataaatctcaggagcccacagatgaactgtgctgtagagttcaggtaattttctaagatatgtatttctaaacaaaatttcaatttttttagttgaaaggtattcagtttttagtagattaagataatttttagtgttaaaatagaaatactttttagctgatttctcacaagattcatggagcattcaggttttctctcctgattttaggagcgaagaggttgaaggaaccatgcttttgggatcatggaaaggtatactaaatcataaactcaaaacattgtcctaactgccgaccagtcattcacattgtttacccttctgcctgtcctaccacctaactttacaggtgaaggaagtgagactcagggacatagtgtataaaagagcacatggtagaacccagatctccttcagccttcctttccccaagccaatttctaatgtaaatcctcccctttccaggctaacgtctcttttcaatgtcaattttattgaatttttataacatcgtaggcactgtggcaagcacttagaatatagagagcatggagtgctccagaagctcacaatatggggcagttgtttttaagaacagcccaaagaccacagctcagtgacactggggctgcttataatatagaggcctaaggaatcagcacctatggagaggttgtccctcactacagctgttaaaggggacacagcaacatgaacaactgatggttagtgctcaagtaaagggagggaaatatgtttatataaatggatttgtaaactcttcctgtcatgttagctgaaggtttttttatgacccttgattcaagtgggcaaatgaaagaaagcatgtatctgaaaggagcagtggtgctgaaagggaagaagggaaaatagagaggaggtggtctccactcccttcccaattaatagaaggcagccaggtcagagccttccatatcatctttacactgggtcttattggcctttgatgccagctaatgtggaacatatatgtgatggtgtgtgtagtccatcctggttatcaactttttattaggaatctaccagacctatctttgctaaatatggtttgctcttcaaaatcatgtaatgtttagcatcagagggtgattaagttgtaggtacacaggctaagcctagcaaatgagaagtgggaactgactttttttatttttttttttagcactttctgtgtcaggccctgtgctgggcacttaaaatgtagcatttatcaataggcagtaaaaaattgtgctgtctgtacagtcaggatgatagcagttactatactccatctatagtccatgaatgggtattgacttccatttctccttcctaatgattatataactattgcacttttaattaggagggcagtgatgctgataccaagaaattcaatgcaatgaactttttattattagagataaaaattaaacctcaattcctttggccttttaattgttaactatggaatcagtcaaatgtggaggctgaagaagcatcaagggataatgtaattgcaacacttcaaacaattgtatctgtctggagaatgaagattgatgatctggaaaatagatctcattgtttcagtagtagagttatgggttttgccagtggctattaagagagcctctctaagaaactttttaccgaaagaaaaaaagtgatacttgttaaatgaagaaaatttaattcagccacttttcattaagcaaggccagaaactctaattcccaagttcatagttgatgaaaggccccaaagcagtaattacccatttttcaagtttcttgatagaaaactcttcaattagatatagacaaggggaaaattatagtataaggcagagtattttgtcctttctaaagagcactaggaaaatacagacaaatctaacaacgttaagacataattattttaaataagttaagcactttgaattatcttaaaagatgttatattattttcagtattgctatttcacttaaagtgcctaaaattttagctcagaaagtaaacttgcattcagtgttcatgtatgtttcctaaatcctcggagagggtaggttgccttgggtgtctttggacattccttggggaaataggttattgtggatgaactaggtagggtttgctgttcaaagtcccagtgaacgttggaagtgtgattcggtatgtcacgatgttaggaatattgattagttgtctcacttgttggttctaatatcacttgacaagcatcatttgcacaataatgatttttttcttccttcctcattcataaataaggtagatgtgagtgtaaattattgacttggtataagcctatggacaatcatggattaatatgtgtaagaggaaatgccttcctctttgttaaaccacataatggtagcacatgaatattttattttacctttttgaagtgaaacaagtttagaaggtgagtttaggtaacctaaggctttcttgttttctttaggagatagtgtttcttgttatttgctactaaccagagaatgaagatgtaattgtttacctcaacaggataaaatgaaaaccactccgattgtggttcaccaacaagctaaactctgagtacaaatatgtccaggaattatttctaatgtgaacacaaaggcgattcagaacacacattgagaatgattagaaatagtcactgatattctttatgattttgatatgctaacggaggctcctgatagcagattgtgaatttaaatgggaggtttctaaaatctcagtcttgaaaactaaattgtatgtgctcattattattagacggctccaaggtccatctttcagaaatgagaaaaaaactactttaccttaaatttataacgtttcttattttaaagtaaaaaaaattaatatgagaatagtgctaaaatgtgatgaaattggggaatcagggaaaattgaaaacagaaaaaaacaaatttaagcccttagcacagtttgttcagggcatttgagataaagttgccaatgacatggttagaaaacaaacaaacaaacataaatgttttctaatggtaacagtaatgcagttttgttgttataaaacatttcaaggccaggcaccgtggctcacgcctgtaatcctagcactttgggaggccgaggcgggtggatcacctgatgtcaggagttcgagactagcctagccaacatggtaaaaccccatctgtactaaaaatacaaaaattagccgggtattatggcaggcacctgtaatcccagctactcgggagactgaggcaggagaatcacttgaacccgggaggcagatgttacagtgagctgagactgcgccattgcactccagcctgggcaacaagagataaacgccatctaaaaaaaaaaaaaaaattcaaaaatgtaaacatgaaaccacaacaacggtcctactgtgcttcttacacaccactcagagatagccactcttagctcctttttttcttttttgagacactctgttgcccaggctggagtgcagtgccatgatctcgactcactgaaacctccacctcccaggttcaagtgattctcgtgcctcagcctcctgagtagctgcgattacaggtgccagctaccacatccagctaatttttttgtatttttagtacagacagggtttcaccgtgttggccaggctggtttcgaactcttgacctcaggtgatccgcccgcctcggcctcccaaagtgctgggataacaggtgtgagccaccggcgcctggcctggtgtttctcatcttaactttatgtgtgactgtgggggactttttttaattgtacctaatatttggcaggtactttctgtcccatctaattatttgctattattggtttatattacgtcattaaaacacattcaaaaagagaaactgagagagaaggaagctgggaatttgcatagccaggctgctcctctaccagctaaagggatgactgtgcttcctgaccaggaacccttaacctacagtacacaagctgtgatctcagctgtgaagttcagagacccgaagtatggattcaacctcatggggcagtgaagtcaatttttaaaaaatgtctgtgtgtgtatgtgtgtgtgtgtgtgtacttatatatcacatacatacaaatgtaagaggattggagaccccaatcctcggaggagggtagtaggtttattttcttcttggattcaggaggaataaaaactcagtgaaactatcacaaacccaatgctaggaaggagattacacaggcctgtgccataatcagtctaaattctgttacataaatttgttcagagacagagttaaaccacagtgagaaggcaaaagtcatctgaatgtggtaagtgaacacggaaatgattgccaggattttgggatcagaacataaaggaacagaaagaaggcataaaagagatcagttttaaaaataatttgagaaaaggatatttactttgcagttataacaggaacagtaggaaatagaagctaggaggacatgtagacccagcaaatcctgtttgccctgcatgtggaaatagagggaaagatcttaaataaagcagagcataaattcaaaaattgcattctggatctgctgaaagagaagagagtcacagaaaggggaaggtggggaagaggaacactataataagtaaaagcaggtcctactgatgcaggacaaaggtgtcagcaagaacagtttctgctgtcatgtattgaaaattatgggagccttagcataatgtattcctttacttgaccctggcatgtgtgcatatatgacctttggtggcattacaggtaaacagtgactggttgaggacacgatttgagtattattggtttgcccagccaaatgctatatctttactattataaattatgctacagcaaacatcctcatatgtaaatcttacaagattataggcatgtcattagttgttttctttgaataattcttataaattgagttacagggccataagtcatgcacattttcaactgttaatacttctggccaaacgttcttccataaagtttgtgccactgcatactgccatcaacaatggaattgcatccatttcccacagtcaaagatgagactgccaacacatgatcagttttataaaactctgaattattttttctaataatgtagaagatgtcaattaagttacatgaactctttttcctgatacccattgtgatcaaaagtatgcaattttaaaatacctgggggttattagaattgtattctatagtgattgaagagtatttaagctatacaaagggatcacagtcattaaattattttattaccaaagtatttcaatccatttgtctaaccataatgtaaaacacttatttttctttcatacttcttattgtgtagccacattaaggaaattaacaattctttcttgccctaagactagaaaaatgaactaaagaacttcagaacatagagtccctgaacagtttggttatgctaccatgattcagctttaaaagagcgtccaaaacagaatcctacctgtaactgaaattttttactgttatttaacaaaatatgaaacattgttcatgtacgttatttaatgtgaaaaaaataaaaataaatggaaaatgtcctttctgttattgaccttaataaatttatgtagttttaaaaacgaagaggtttaggagaaaatatcaatgccagttttgaagactcacaatgagtctagttagaatcaaaagtttcaaaaaaaaaaaaaaacagttgtttaagtcatagataatttattctggtctcacattattttaaacagctgcatgtataatagaaaggatccagggatcaagaattgaagtgttagacttaacactgccactttctagatgtgtgaacttggggaacaaaatttgaccatctctgagtctcagttcatatatctatatttagaagacaattttcagtgcttcttatctctcacaggatggttctgagtattgagataaaggactgataatttgtgaactgttttacacctctaatattacttactacttttaataattagggtaagatattttctctcaagacatcaagatcttagattttaatatttaacattcttaagttaaaaccagtaaaggtgagaggaaattgaaggaaagtcaaaaaagaagaatattttaagtaagctttatattgaagtataacatacctgcgaacagtttataaatcctaatcgtttgtcctaattaattataacaaagttaacaaacttaagtaactactagccaggtcaagaaatagaacattaccagcaatcagaaggtccccgtatgctctgttataaaccaataactactatcctattttccaaagataactactatcctgacttctaactttataatgtagggttgccttttcttgacttttatataaatggaattatacaatatgtattttaaaaatcagccttttagagatgttatgtataaccatagttgagtcatctttattactaaacagtatttcatatttcaaatatactataatctgttcagaaatactttttcaaattaaggaagttccattttatttatagtttactaagcttttttgtcaaaagtggaagtttcactttttaaaatgccttttctacatttcttgagatgatcacatgatttttctcctctattctgttgaaatagtaagaattagattgattttggaatgtttaaccaatcttgcattcctaaaataaacataacttcattatccaaagtaaatggtacaaattttataattatttcaaagtgaaaagtttatttcttaaaagaaagaaagtgagaaagaaagtggagccatttattagccaggtttagttgtggtcaaaactaacgtacagtcactttaaagtcgtgagtttcaaatgaagttaaaacaaaatggagagaaatcagggatcaggtttagactgatggggtaggcaaaagcataaataagaaacataaacagtcagtttaaaactgttaagtctcagaatttcagaatcagttgataaactgtgaacagcacattagaaggcataactgggtgggaatctttaggggtgggaggtgattcacctgacttagtgaccccgccatgggtcgaaagcataggaatctccaccaaccattctgctgttcttctttgctataataacaacaacaacaacaacaacaacaacaacaacaacaataatagctgttaataagaaataaaatggaagaaggcttagaattttaatggaagctcagaatgattaccattaccatttagtccaagatccagtggtacatctgtaagccagggtcagtttaggacagtttttcactggtgctgacagaaattaaggaactcagtcttctcgctgaatttgccagattagaagtatttttcagttgcttgaaacaaaattacagtcatgcatcacttaatgatggggatacattctgtgaaatatgtcattaggcgattttgcagtgggaacatcatagagtgtagttacataaacctagatggtatagcctggtaaatatttgtgtatctaaaagtttctaaacatgaaaaaggtactataaaaatacattattataatcttattggaccaccatttaaaatgggatctgtcattctgtcattgactggtgtctttgaactgcagttcagtcattgactgaaatgtcattatgtggtacttgactgtagttccttctatatattagactactgacaattacatgagcgtctaacactgcaaagcattgagaatacaaagtgttctttgtattctaagaaagcacaatttctaaccttaaggaaattataatttggttgtgggaacattggttaaattcaaattaataaattttcatacacattattgttaatgctcaacatcatgtgggaatgtgtggatagcaaatcttagttcaatgtagagggaaatttccgtggggataggaggttggatgacttcccaaagagcatataaccttaactccactgataactgtttaaaacttaaaataacagagagtatggcagaggacacagctggttaggaaagtggacttgagaaggcattgtgtttgtttagattaaggtcatctatactgacagaaaacccaaaataacaatggcttaagcaaaacagaaatgtatttcttcttttcctagtttgtcaatcatctgtgtctggcatgatattccaaggtatcaggaaaccaggttcctactttcttttgctctgatatcttcaagcacacagtttcacctcagtgtcctgtatggcttctcaggcaccagtaattacatcccaagcactagaaggaaagaagcacaggcacttcctcttcctttaaggaaatatagtacctagaagtccttcatggcctgagctttgtcacatggcacacttgcctgaaagagaggctgggaaatataggctttattccaggtagccatgcacctaactaaagattagtgatctatttataaagaaggaacaaacatatactgagagagtaagagaactctgccaaagttattggcacaggagcgtaggtgtgaggaatgttggacaagtgtgaggagacagattgactgaaacagataatttttgtatctcatatatccaacacaagaaaataacttggtcatgagtgaagggaatcacagatatttctcttaaagaaaaatccagccttattcagtttgactttaacaatgaagtcactctttttttctttttggtttgtggccccttgatagaaaaaaaaagagctatttatatcatccttgctaagggggactaattctgcaaggtctctaggttcattcttctgtggtatgtatctgctcagattattacacaatgcaaattggaagtactgagaactctactagaaggaatgcatcttgaactagaatttcagaaaataacacaattctgtaaaaaaaatctcaaatggtgttttagaagaaggaccctgtgaagtggacggggaaaaaatggaatctcttcaggttagtctgctttttgtttatgtagaagagagattaaacatataaatgaaggcatgaggcaccatcctcatcttttcccattttcaggcataggtttggctctgcccttcccatctcaactattatctaagtcacatgctaggcaattagtagatcttttcaaataaaaaatgtttatttgcctttctgatttaccattgtaacactagaactcagagaaagcattttaacttttatagtaaacaataaaaaagcctcataaagcttctcacaacaacttcattcgtttcagaagttaagatatattccttatgaataccaacattgtgacatttgtgttgccaattattttctctggaatcattcttttaacttcacttcctgttgtttgggaagactttgcagagaacatatttttaataggctataatcacacgggcaacagagatcttggcaagtagctattaacggtatagacagaaacttggagtgtgatggttttagacttcctgtgcttcatgatgctattttaatgcactaagagtataaactaaatttagatcctgctgactgttgctggagtgagtgcatgtctcttttgcagacaatgctagatttagtttctgtgtatttttgtcaagctgggaatgcagtttgaagctcccagcccttctaagcatttttatagctatacatatgtatttcatgactgctttgatttgcaactggtcacttaagttttgttgttcttaaagcggttactgacacttgtggtgtttcgtgtgtgtgttcattgcattttattttaataaatcctggggttatactaaaagttaatttctgacattaagcccatattactccctgagtatttctctattccacagtttttcaacctcagcaccatttggcatgtttagcagcatccttggcctctactcattagataccagtaagcacttctctccacctcagtggtgacaacaaaaatgcctcagacattaccaattgacccctgagggacaaaatcccccccagtgaagaaccactttccactctaatccgtccacttctttccaactccttcactactgccacagtccaggctactgtcatctctcagcagatgatggcaacagctccctgtgggcctgttctgcctgtccccccgctgctctccaggtcattctccatattgtagccagaatgatcttttcagaactcaaatctcatcatgttactccctttaaaaatactgtcggcctcacgcctgtaatcccagcactttgggaggccaaggtgggcagattacgaggtcaggagatcgagaccatcctggctaacacggtgaaaccccatctctactaaaaatacaaaaaaattaggctgggcgtggtggctcacgcctgtaatcccagcactttgggaggccgaggcaggcggatcatgacgtcgggagatcgagaccatcctggctaacacggtgaaaccccatctctactaaaaatacaaaaaattagccgggtgtgttggtgggcgcctgtagtcccagctactcgggaggctgaggcaggagaatggcatgaacccgggaggtagagcttgcagtgagcagagatcgtgccactgcactccagcctgggcggcaaagcgaaactccgtctcaaagaaaaaaaatactgttggccaggcgcagtggctcatgcctgtaatcccagcactgtgggaggctgagggtgggccaatcacgaggtcaggagttcgagaccagcctggccaacatggtgaaaccccgtctctactaaaaatacaaaaaattagccgggtgtggtggtgggcgcctgtaaccccagctacttgggaggctgaggcaggagaatcacttgaacccaggaggcggaggttgcaatgagcggagatcatgccactgcactctagcctggtgacagaatgagactccatctcaaaaaaaaaaaaaaattactgtcagtatttttcaatgacttagtacacagatacaactcttgaaagtggcctaccaaattcatcctagttggacacaaagcactccttggcctcacctcaacccactttctcataccagttcaggcccttatacctgcccttttcctcctgctcttgccttactccacctgtttcctctcacctgcatgactcacactcactcttcagttctgccttcagcctcaagctgccagtgtattcttatttgacgatgtaggaacaaatcagattgacaaggtactggtaattctaggtcaattggattagagtcaattatccgaaaactactttatcaaaagacccgattattgaactaagtcagcaaatacagttgacccttgaacaatgtgggataggactgcatgggtccacttacatgcagattttcttccacctctgccagcctgagacagcaagccagtgcctcctcttcctcttcctcctcagcctactctacatgaggacgactaaggtgaagaaccatatgatgatccacttctacttaatgaatagtaaatatatttttcttccttattttctaaataagattttcttttctctagcttaccttattgcaaaaatataatgtataatacatctgctatataaaatatttgttaaccaaatgtgttatcagtaaggcttttggtcaacagtagactattagcagttagatttttgggagttgaagttacttgtgaatttttgactgcatgggggttgctgcccctaactcccatagtattcaagggtaactgtatacaaatttaacacaaccttgattttctttttactctgtatagtgtttcctacagtgagttttgcatgggttagataggattttagggaactatgaggattgtgaggagttagtatttggggatttgggggttataaggctttctccctacctgtgagccctgtccctctattcagttttccctctctgggactagaccacccatgtgctgacctgtgtctccatctagcagacagctggagtcagaatcaagtttaaaattccttaaaatgcagtaatggtaacataaggaaaagaagaaatcttcaaaatctattaaaatatttcacataatatgtgtgacttcatagtttgtaagcagataaaaacacaatttgctaaattgttgaagctgataaattcagtttgtcttttggagttataaggaaaggatcctgaaaattctagaatattggcaagattgataatgactttaaaataattcaatagaaatcagtatcaggtgaaggtttcccatgtgaaatttgggttatatttataagaatgaattcattcataagactaaaccacccactgccccctaacttttgacaaattaaatattattttaaaaggtcataaagccaatgtatttttactacagtcaagaaaaatacgtcatagttgctcaattacaattctacatttacttgattaataataatccgtctccttcactacattaaaagctccatgagagcaggaattgcgaccattttttgctcattaattatctacagtgcatattgtagtaccaggcatagagtagatgttcatttaaatcttgttaaatagataaatactttttttcaaaggaatgcaatattagcctttaatatataataatagcattgcaagttgtccctggccttacaaaaactattgataatttaggatatagttctgtataaacaatgatatataataacatatatagtaactgtgcttctaagatcaatacatctaatttaatcttttgatagttatatcaaacatttcattttcagataaaagtctgcatgattttatgttgcataaaaaggtttataaatcttatttactgctgtaaatgaaataatgtggttctttattaagtttaagaaatattccattgtgagagtattttaaaaagttatgaaatagtatcttcaaataaaactagaatatgagtattgtctttagattaaacagattccacttaattgttggcagtgatgcttttgtagtttgagttgatgtcattctgagatgagtcagaatacatatgaatatagtaggctttccaaaggggctggagaagaggaaagtcaagtgaaggaggcagaaggaaggggggcaacaggtaggcctgagagaaaaattgcctttttaattttattcagggtcttgtttgaaaactgccataattccaacacatgttctcattttttcttctaaattcttcttccacataaaacattaataccagttatttaatctcttaatgatcattatggggtctactatccataattcttcaattatttcatattttgtatactatactttataactttaattaagagatttgtgaaaagcgtatgatgttttctgtttctgtcttttgctcatggtggctcataattttggattgtgagctcatgttccactgggctttctctgtgggaacttcaagccatgggttgaggatgcacttctttagaaagaatcactttagttacttccaggtgctctaggatgcaaccaaccctggaacatatatgttacttcgcttggcttggggtttcttggaccaggaagatagtgaatatctaaatcctgaaccatgtaagggtaggactatggttataaattctcagaaagccactctctcccctcaatatctaaccaaaacagacggcttttcttgccgtctcgctttgctgttgagtagatttctctgcaaaggatttggccttgagtttcattttttaactccccaccttgcagaggagcagagccttgatttttgcttctattcagctgtcagacctaagtctctaggatacccacattggaatgccctcagctgtcttagttcattttggctactataacaaaaaaatgtcttaaacttggtggcttataaacgacagaaatttatttctcacagttctgaggctgggaattccaagatcaaggggctagcagattctgtgtctggtaaggacccacttcatcatagatgaaaaagagttttctctgcatcctcacttggtggaagaggtaaggagtctctcagacatcttttataagggcactaattccattcatcgggcctctactcccagatgtctcccaaaggcctcacctcctaataccatcgccttgggggttaggatttcaacataaaatttgggagggacacaaacattcagaccatagcattctacctctcactcctcccctaaacctcatgtctttcttccatacaaaatacattcatcccatcccaagagaaccgaaagtcttgacttgtttcagcattgactcaaaagtctaaagtccaaagtctcatctaaatattatcaaaatcagatatgggtgagacttaaggtatgatttattctgaggcaaattccccttcagctgtgagcctctgaaatcaaacaggttttgtgcttctaaactgtagtggtggggtaggcactggacaaacattcctattccaaaagagagaaataggaaagaagaaataagtgataaattctgagtgagaacaaaatcttaaggctcaagaataatctttgattcaaagctctgccttccagacccactggagctgtggtcccaccttctggacacattggggcagaggttggatctgcaggattccaagcagccctgtccacactgctttgtagggcatagcccatgtcacagctctcaagagtttgaattggacacctgcagttctcttgagctggaatcttacccgggtgtctctaccaccccagggtatcaggagcagccattttgtcccagttctgctaggccttgccctagtaggggctctgtgcagtggtgctgtcctggtgacagttctttgcctggttcccacagtcctccagggcatccaaatctaggtggaggcagccacacccccactgctttgctggctgcagtgcatgctacatctggggcagctggggaacataggatggagttcagagagtggagtgcaggtggcagagccttgagacagaggggctgggggaacagggctacaatgaagtttcatgtgtgcctgtagccccttcgttgaaattgtactacctacctcccttctactgtgtgcctatgatgagggtggcagccctgatgatttctgaattgcttttggagtcatttgttttagcatcttggacaataataggtcctggattttgtttagacagctgactcatcttcttggatcatcatcatttggccacacccttcgtgttttgtcttgaatatgcttttcaatataataggttctgaatttcgcaaaggtttaagttctgcttcccttttattaataattccatttttaaattagctctctcttctcacattttactaaaatccctcaagagggaccagattgcatccatggtgcaggctaatcagaaaaagagaatatttttgagctgagctggaaatcacatgcaggaattcagtatttcaagcgggaggagcataagaaaagccaaagacactcttggaagttcttattgtgttgaggaacattaagcagctgacagtcgccagaaccatctcaaatagacaaagtttttatacttgaaggcactttgatacaatagtggtagctaatattcaccaagcatttgctgtgtgccagtcactgttgcaagtgcttcacatgtagtatctcatttaattctttcaacaattctgtgaggtgggtgccattatcatcacattccatagatggagaaactatagataagtgacttttccaaggtcacagagttacagatgggcaagctaggaaaactaagtccagttattctgacccagagcccacactcttagcctttatcctccactgctcacaatgaaggctggatttgctctggaggatttaatcaaaagttctcatttttgagaaatctcaattaatgaagaaaatttatctctttagactgtatgtaccccctaaattcactcattcttgttcaaattatttaattaaatattgtccttctccaagaaaactccgtgattaaacggatgccttttcagtggtatgttggaccagctcatgagaaccaatcattagcttttcagaacttttgccagttattaaatatagctgtttttaaaataaattatataaatgtacattaaatgaattgtatttcaaagtgagtaacaaattttcaagacctattagttcctatttttttttgtttgtttttgtttttacgttctactgctatccatgctcttgagtttttcttatgactgttacatctgtatggtggaagtactagagagtagcatgctactgtacatctcctcccaattccacactcaataatgtcatgctgttagctgtcaattggcaatggtgaaagtattagcaccatgattttttttttttttttttttgagacggagtctcgctctgtggcccaggcgagagtgcagtggcgcaatctcggcccactgcaagctccgcctcccgggttcacgccattctcctgcctcagcctcccgagtagctgggactacaggcgcccgccatcacgcccggctaatttttttgtatttttagtagagacggggtttcaccgtgttagccaggatggtctcgatctcctgacctcgtgatccgcccgcctcggcctcccaaagtgctgggattacaagcgtgagccaccgcgcccggccagcaccatgattttgtaaacactgctaatcagggattttccctcacctccagagagctggttgctcaacatgtaccaccacaccaccaccattatctcttctttaaaacatttcaccttaagttgattctcaggagggctctgtattatatagagggtttaacttgtgagacctctggtgtctaaactgtattagttcttcagtacctaaaagaagtttggaaatgttcatcagtttctcattaacataattatttcagaaaattgagaatccatcttagctttaataacctccaaagaaaccccatccttgtgtttcatgatcaccagtgaatgaaagcttcttggtttaagaaactcaaattcattactccagagtaaaaatgtgttttttcattttccccctcaatttgctgaagctgggagccactatcatgtagaggaaaaagtcaagatacctagaggctgcttctggctaggccactaaatagccaggtgatctgggcttagtggtcactttgcactttagaatcatctggagacttaaaaaatatgctgggaattttaaatatgctgatgacaggccccacctaagcccattaagtctgaatctttgggagttcgagcctatgtgttggtgtactttgaaatgctcctgagatggttttaatatgtaaccaatttgagaactactgttcaagatatttacagaggatggacagtctgtgattaaagggtccggctgcagggccagaactcctgctttcaaatccccactcctcaacttcccctagctatgtaaccttgggtaagttacctagagtctctgggcttcagtttcctcatgtgtaaaattagaataatcataatatattagttaatacagatagaacctttaaagcatcttctgacactcaagtattttttgacagtagtacaactaaatataaatatgctctcttcatagttctgtgttgtctctatgctttgtaacatacagccatttacatacttgaagctgtaccttgatattctttttactatactttttaagctttccttttgttttctagccttttaattatatcaatatttccccttttaactgcccaaaattctttattttccttttagttggaaaaccccagacagggtaaagtgcttcagatggctccaagccattgctgcacaatatctactgtatcattttaataaatctttagaattaaaactatgatttggctaaaaatgatgtttcctttacatcacaaaaaattaaaattgtcccttttttcccctagcttatgaggtagtagcaatgaatttttgtagaccctcctctcagcagaaactaatcaaatatagaaagttaaaaaaaaaaaaaaaaagaaaggtgttggctccaggaactgtgtgataagatgaacttgtagagcaaaacactttaaccaaatctttatgtgcaaacaaaaatagagaaaatgcactgtttccatccatttagcttaaggagggttaatgactaatgaaatagaaataaaggaggaacccatcatgaatatactattttaggagcaaaattcactggaagaagtagctaaaaagtagtttgataaaggagaatatgagggcatggcaaatcaaaaggacagactactgtatattgtggtctcttcagatgcctgtttttcagcacctttgatagagaaaagggaaaaattaaggtaactatatgagtattaccaacaaatattttgaggttaaaaaatggaaaagattaattcagtactatggtcttctgtgaccctcataattttatatatagaaggttgtagaaattattaaatatcatggtgtcattaatattaatgcatattaaccagtactccaaattgacttatggataggatgatccttcagagacttaagaggaattgagtaccatcacttgtgattaacttttgctcttttcttgtggagaaaactaagtctagatacgtgaaaagtcattttctcttgattaggatttgtttggttgcaaggaatagacagactcaggccaacttaaggaggaggaggtctgttttgagaatacaacagtgaatctcaagaaatctaaggtcagtgattgtagctggctgggacttaaatacaactgatgtcagttacctggaaaatcatagggaatcatcttttccctcaagtcagtgtatacctctcttatgatatctggtcatctctgcactgtatgttgtattctcctctctctagggacctttccttcttccctataaactctggcttaaacatagctgccaatgaagctgttcagagcttggcactttccagcatttactccactgttccacatcttcccagttcctgagggatggattagcacatcgttttgaaccaggccaccagtcacattgtgtctgattagctgccccgaaatcagtgacccacacctggtccagtcagctatggctggaatgggatagagtcatgtggtacaaaaaggggttagattaggtagaagaggctgggggctggcaagcactggacacatttcttgtattctgccttaactacaaaatggtgggggggagggagactaagttttttccaggtaaaagttgcagcacatgcatagtacatgatttctgcagaatattagtgacaaaaactcagaagtcttcctggtttactactgtgtttccagactgttttaagctcactcgatactatatggctattctctaaattattttgttgcattactgaatgttaatgtaggtattaagattgagttggggaaaaaaatccacagaaatagcatatcaatatctctgaatttcagaatctttcccttttggtggggggaagagggcagcagagatgaaaaactaaaattttgccaattgtattatgccaccaaacccaaaaaatgttaattaatataagaaatgtaatacatattttattatgcaagttgttaactgaaagacacataaagacctgggagttttcatcttaatatggataaatgtgataatcttcaaaaaataaccatgataaatgaatctagataaaacaaaaaacaacaacaacagctacaggtatttttgtcagatgttggagtctgttcatacattttgtagattagcccttttggtgagagaaatatgtgagcaaatgaaaagagctctgtgatcagaatcaggaaacattagtctaacataagttccatgagagcaagagctcccgtagcctcagcactcagagcagggcctggcccagaatggaaactcaataaagattaaaagaatgaataaatattcttatgattatttgacaaaaaaaaaagatgattttcctctcttggtgtcagtttcttcattaataaaatgagatggttttggagtcattttaagaattgagattctatgattatataacatgtattcaaaattttgaaacatctgtttgttaaatcttttcttaaaactatattctccatttgaaagcaagtaattcccctgaatgaagcaatcctttatcttttcattagtaagatggtttggaatttatatgtgtgaattatcttggaaaacagtatattactgataaaaatattttatagctaatttaacaatgttaaatcacaggaggggaagctattgccatatgcctctcagacgatatttcagcagttttgacttcagctaactcaactcttataaaatacatgattttcagtctcataggcaaacatctattgtaaccaactctggaaataaaacaaaaacctatggtgatttccttaatgaaattttttttagattttatgttaatagggagcaaatcttaaaatctttttgggctttcatctcccaacattagatgtatcttaacatttttgtttgcaaaatatcatctcactacaaaactgtgcgacttgtacaaagtttcatggtcttgtccatctccctctgaatatatgccatgggcaaactaggaaaaacacattcctcccagctggcaatcactcacatgggataaacagtcagagcattttgctgccctaggcaaactctgcctgagaggaccagctggctttgcatagaaataagcaaggtagagtgggtatacattgagcaggtagagatttttttttaaatgaaaagaaaaaaaaaaaagatagcacttctaatttaaccctgttgaaaaacttgacatatctgagcatctattttaggaaaacctacattgcgttatttgaacgtctgctatccagtgtaggaagggagctggtgctctgtctggtggcatcactgatgacataatacaattattttgatgtgtccagttgtgcaaagatgtgactagttcgaaccatgttgattatacagcgtgatgttgtcatggaaatctgatgacactgatagagaataaatagtttaatgagggccaggttataaaggtttctggggagccgcagcttccaaacgtataaattattgcctttgtccaagttaaatgtctgggtagaaatggcattgtcaccgtagtggtgaaaaagatttagtgccttgaaaaaaatcatgcatgtaagccagtctctgagctggattctcgtcatcacctctctgaaagcttctgatgctcatctatatggatgcagagatgcagatactacaggtgaaaagattaagtcactgaggagttgcgggaattgatcattgtagctcactataaatattgtattatcattatcctcatttcctttatgttgtttatttcacaccacttactatacattagcattgtgacagtgatcagtgtgagcctcccgtgtgtctttagtccacgtgcttgcacaggcctagcaccttactcctgtggaaccagaggatcagtacggcccagaagaaacctgggaatttgtctagttctcaagatttacttactataaagtttttaaatgggattatttaaattagctaattctgaatccaagtttttataaactgtttaaaatttttttcatagtcaaacacttcccactatcattttttaaatgagggtttttataatttagtgcaaaaaaagtaaaaacacagaaaatggtaaataataaacaaaaatcctgcaatgttaacagattttggagtacttccttccaaatatgtttctgtaaatgtgcacaaacatttacatcaatatatgatatgtatatttttacatagttgacttctattatatatccagttctacattattttccccacttgttacatagtgtatgtacattttcttatatcacttaatatattttataatatttcataatacaagacacatccagtcttctgctgttggacatttaggatgtgtccatatgtttgtgattatacataatgtaatgaacattttcactcacacaacaatttttttctttttgttctttatttttctcttctggattttcagactcagaactcatgtaactccctcaatgttcaatctattcaaataagtagtagcctagttaatagcaattatctgtatctacagagagctgtacttgtgaaaaattgaaaaactattcggctacaatttttcctcagttaagcataatttcaccagaaataatattagttaatgcctttagatggtcttaagtgaagcctaagtattaaaatgaatgcaattgaacaatttacacttattttagacaataaatatgaaatattaatggataattcaagaacttaatatttagcattatagaaaaatgtgaaatattggtgtggtttaaacaatctactcttagatactttagttctactctgaagaggggaataaaagaaaaaaaaatcccctgaaggaaaaaaaaaaagccaaagagaaaccaaaagaaccacttgcttttttgaaaaaaaaaaaatattttttacttaaaactatttataattccaaaaaatatgaaattttacattctctggaaatcattacagaaaaactttagtttaattctgctgcctcaattctctggattttacaaggaggaagctgggtaggaccactggatttgaagatttgtgaccctggacaatttgcttgtgctatcttggtctcattggcttaatctgtacaatgactgtatgagaactgaatgtaaagtccccggaaggatgcctgacgcatagctagcacttagtttcttctgttcctgcttttaaatgataatgagagattctttcatgagatttttttttttttttttttttttttgagacggagtctcgctctgtcgcccaggctggatggaatgcagcggcgcgatctcggctcactgcaagctccgcctcccgagttcacgccattctcctacctcagcctcccgattagctgggactacaggcgcccgccaccacgcccgtctaattttttgtatttttagtagagacgggttttcaccatgttagccaggatggtctcgatctcctgacctcatgatccgcctgcctcggcctcccaaagtgctgggattacaggcgtgagccaccgcgcctagcgttcatgagataaatttttaaaataattgctctccttgatgaaagacagcaactaaaactgagtgctagtaggtgaatggttatcatttttccataaaatcataaacctgtagacaacttgagggatgactgataatacactaaacataaatgaagaattaaaattcagttaagcaattctggtgtccctaaggtactctgatatttttgtgtgtagctaattggtcaaaaaataatgaaaacaataacttaaatatgtgtagcaatttatggtttcaagtaccatcatatttagttggtttgatcctcacaccgtcaatattacagaagttcatgcaaggtgagtaattggccttaggcaaaaacaactaattaatattaaagacagaattgaaagataccttgttatttctctctcagttaagtcttttaaccatcaagtaaggagagaagaggaaaatcaaaactaaaatgatagagtatctaaaagttaatggaagggaaaacttcttattaaaactgtgctcctcaatgatttttagtatttaataaaaaacaaaaattgaaaataaatgagccatgtatgcatcataaaaactagaaaaagtttatcaaagtaaaagaacttggaagcagacattaataaagataaaaagcaaatattagtggaatggaaaacagaagaaataaaaataaagcaagtattttaaaaagcagctgattcttttgggggggattcacttaaatagacatccatggccaacctgattaaggaagaattaaggagagtacaaatggaaaacatcccagttccatctaaccttccaaaaacagataatcctactgctattcaaacttgttagagaaagagccggatgctcagttctccatttccttttatgaaattagcatatacttaatatcaagcgcctggtaaagatgctgtattagtttgctaaggctgtggtaataaagtaccacagactgaatgccttaaacaacagaaatgtattgtttcaaagttctagaggcaagaagtacccactgcccaccaaaaaaaaaaaaaaaaaattacccataaactataacacagacgtttaaaaaagcccctctggatctgttattcacaccagccacttatctttttgatatttctattcagaaggattagcaatttcttctgccttcagttagctgcattgctgggcctgtgataggcaaacttttgtatataccacagcttcctccacttgtggttacctttctcctgtcctttcatgcaatggattgctactttgcaagacaatctgaaactgctgtaattcctccaataatgaacatctgcttcactaataacaaatctatatcccacacctgtttatatgctggcttagtatttaatgacttttattattaaagccaaatcacagtggtttttaaaaagtgactttaatgccaaatcatagtacttctttttaagtgtaaattttcaaaaccatttttaaatggcaattaaactcaatacatggtatatgactcaaaagtgatgtcatttatgtgattcaaaaatgatatcactcaactgagggaacaatatgaacagctatgacacaagttcatgcacacactgatattgaccaccacagtcgtgaatacttccttgtgggtagttattataagacgcaaatgattatggatgcacactgatttagagctgtgaaaatgtgtttgaaaagtcttagattctaattaatatggcaataaaacaatttataatggatattatcctcatcctagatgttagggtaacctaataaggtagagcaatggttctcaaagtgtagtcccaggacaagtaataccagcatcacctggtatattagacagggttctccagagatacagaatcaataagatatagatgtagatatcagatatagatatatgagggggattaagggaattggctcaacaattatagaggctgagaagtctatgacaggctgtctgcaagctggagacccaggatgctagtggcatggctcagttcaagttcaaggcctcagaaccagggaatatacatatatttgatgtatctattgaatatgcaagaggcctgaatttcataatggcaaaaataggccttggtctcttttgtaattgtcatccttagccatttctctttctttgttccctttgctttaaattatcctgttttcatagtccttccccattttccttttaccaacttagattcatttcccttttacagttttctgaaactttctttccctcagttttcctatttttaactttttaaccttgctttaaccaaaataaaagtaactagtcatgttaacattgaatctccaaattaaggaatagagaaatatagaaatatgaacaagtaccgataaaacttcactattaggactctgggaagctaaactgctgtactctgtcattataacaagtaaaagatagtatctattggaggataatataaaaacaattgctaaaatatgctaatatttgtgcatgtcattttattttctattttagaaaacatagtctcagaaatcacattcatctcattggctttagtgctggcttgcatgctatgtattcttcttttgggcccagacaaattttcttttttaaaaattgttaatacacatgcctgtaactgtaaggcttgttcttctctcaggagaagcctatttcagaaataattatctttgtattggagtcaaacaaacaatccatcatgaaactgaaatatcattggaggttcaagctcatagcaccgaataataaatatatctgtattttcttatcattggtgagataagatgcatcataaaaactggaaaaagtttatcaaagtaaaagaacttggaagcagacattaataaagataagcaaatattagtggaatggaaaacagaagaaataaaaataaagcaagtattttaaaaatactttgtgaattgagtagaaaattttacttgggaattttaaagaaacagcatgatcaattcagaatttacatctcaaactccagtgaagtaacttacttttccataatttttgttggctctgtagactgaggaggcaacatctactgacagtcactgtattgtttgttagtttcaaacgaagtacacagtgagtgagtggagtcaggccagtactccagcagacttaagatacaaggaggagtttgtgaaggctcacactcaatctgcaataaaaccggtggcaggttaatgtacctctcagctcctgatacatttattatacagaaattatagaccggctgacttaactattgctaagaaacatgcttcttggtaagtagcataatttacaaatgttgatttgttttaaaatgataggagatatacatatttggcttttgttgtaattttccagagttatacagatttcatacagtgctgggcaatgttgtgtttagtattatttgtcctactagatttttaggtgacaaggtttggcaatttagaataatcttggaaatgtgtatataagttaaagaagcagtcatgatcagtatttgacctgtattttttagttccattaaaatcagcataacatttttgggtttaatcagtagttgttaaagacaatagagtcttcatgatctaagtgttagcacaacttcttgtttaaaatattttggacgtctatatgttgttaaatgctctgatacgtattctaaaaaggactggttctatgtgattattataatacttaagataaatggaaatccctagattgtcagttttaaaattagtttcaagtagtggaacaatgaaaaggtaaaattttaatatgctgtatatttttagtaatattcataattgtatattatacaatataaaatatttttaaatataacatttgcatgcattagtcttaatagaaatctgacaaacctttcaaagaagatgatataggaagctttctcattttataaaagagcataataagaatttcattggaaaatatataaatgttttaaaaatgcttcattgataaaatgcttcttttactatcaagttaatattgtaaaatactagtgaaattttagggcttggattatttatttggaaaacaaacattttcgtaagagaatctattggtaagtacacattgagttgaggaattttccagttaataaaggctaaacagatatctgaaatctccaggaaatttaggtgaaaatatattttattgcagtgattatacttcgaacagttgtgaacactacctcatgtgtgagaacaatttcagtctttattttggaggtataaagaatgtcactattttggccaggcatggtggctcgcgcctgcaatcccagcacttggagaggctgaggcaggcggatcacctgaggtcaggagttcaagaccagcctggccaacatggtgaagccccatctctactaaaatacaaaaattagctggctgtggtggtatgtgcctgtaatcccagctactcaggaggctgaagcaagagaatcacttgaagcggggaggcgaaagttgcggtgagctgagattgcgccactgcactccagcctgggaaacgagtgaaaccccatctcaaaaaaaaataagaatgtaactattttaaggaatgtttgataacctattggggatatagtaaacataactatattagtagcttaaatgatacttttacttttcagtgtatttaagtaattaacatattaggtcaatctgcacagagaaagtctataattgattatgtatttgcagttcaagttttgccttaatttcaagcccactattctacttggtaacagtattataagtaaagaagagtactagtctaggaaataggagacccaggttttcatcgtggctcctcaagactgcttctaaccattgggtcatttcctgtatgaaatgatttcttaaagttttactctatttttgcaaatccacttctgccttcttggcttccattatcctgtgatattggcaacactgtatacctgtgtaaaatgcattggagattttaaacaaggacagtcttttcacatggaaactccctttaggtcataaggttcagtgccattggtggggaaataagtgatgttggtgatttaggagaatgatccctgcctctggaaagagcacctacgcttgtgtgaagtgttcaccattttgtttatcatttaccaaggtcctgagacatgctgtttcatgaccttcaaagaaaattctgaccaatacccaccttgaagatacatattttttaaaagggatcctgcagttgaattcatctatgcagtagcttctcacatgcaaaatcataaaatattttcatatcatatccatgacctcttcatttgcccaaggtttcctccctttgattgaaaatttaaggtttgcagacttgagttttccatcatttcactgtggtgagatggcaaagcatgagcttgagatgatgggagttcaaaacccttctcctccacttccaagtggtttcacgaaaactacttgtcctttctgcactcattttctttgtaaataaggataccaatattaaagattgctgtaacgattaaataggtaatatttataaagtgtcaagcataatactttaaccaataaatggtagacaattattgttgtcttactaaattattttatcaactgtcttattaatttatcaactgtttctatttggattcacaacactttctaggattgctgaaactgtatgggttttataaagttatttacgtcaatgttccagtaagatgagtgaattattttcctgtgtgaatttagaatcaaccagatctaactttaaattatagttgtgagctataattacttcaatggttaagaccattttggcctggaggagtaaaaagttatattttgcagtgcatgtgaaagaagtgtttgtgaattcatttctgccttctattcatatcttagttaaaatgagccacggttttgagcagtttctttggaacgttacataaacttacttattcttggccacatagcagttgggaacacgcaaacaggcctgaaaggaaccaaacagcaaattctttacaagcaggaaacctaatatttacacaataatagggtgatggccactaaggtggcttatgactaagttttcttgttcatcatgaataggagctagcatcttttcttcaaatacttgtgttaatatgttcaacgggactggactgaagtacagttgtgacgcaggcatttcaacaccagaggctctccgctcttccccttccctgccccaatacagagtgacctcccattcttctcctttcccttatcaaactggctttctgagcttctattttacaccaggatacaaatggcttgttgtggttcatcaacgttttctatatatttgcattttaacacactgaaaaactttaagctaaaaatctaaagctctaagcccatacaattgtaagcaataagagtgacttgaaaggttttggagaaacatagaggtataatatctaaatcatacatattcattgctcccaaagggcaaaaaaattattctaaggagcaaaaacttattctttttatgtatgagcacagatatacatatggtacatagatatatggtatatctatagtattaaaatttcttgggagacaagtatgaaaaaaatgtctaagaaggtcccttaggagagcaacaatgaataaaaaggttgagaaacactgctgtagatgagggtatcaaagcactctatgatcctgcagagtacgaatttttgctgaattgttttttaatgtttttagtaggaaggaactgatgcctgatttagtacttatatttgacaccagtatttatgttttaatacatcaaatatgattagctgctgtgccattaccctttttagttttagtaggaaataaagaggaaagacttgaggacaagatatacttaaatttgaatccagctgtacctcttacttgttctgtgacccttggcaaatcacttaccctctttaagcctcagttttcttctctttagtttacttgggaatcaaaatgcctacctgatggaattccaatgtcataaagattaataaaaataatatacataaaactttctgcaaattgcctactgtataataaatacatgcccattagtagctataattttatttgttgcatctttttacatcaattactggtttaaaacttactatagaaaaagaaatctagatttagcaggtaaaggtattatccatgaagggcagaactccctctaagacaaatgttaatctatttgtaaaaataaaagataaacttctaatatttctttaaaccagtaaccaaacctattaacataaataaaaaacagaataaaatccaaattaacatatctagactaatataatctctgttaaatgttgaataattgtctgggctattctattgaaataccttttctttaaatactacattgcactgagctgtaaagtaattgttttattcccctagaaccatgactcagtattacttggaattcccatctgtttgtgacatcacttttgcctcgaatgttattcccttactgggtaaacatatttgcctttagatttcatgacatgtaattgtaggatagatgagttaattgaaaggaaatagtatttcttacgaggattcacatggagttagtccaatttaagtattaatgcaactctgtggaaaattttgtttctttaaaaggagggtccacaatttaccccacctctctctctctctccctctttctctctcttcctgtttttttcctccaagtacttattctgcttttgtgatttgctcttaaaaccctaacctattaacatgtgttcagggttttttttttttgctttcttttctttataagattaatatttaatacctctagagacaaaactccaatggagaagggaagtgcttcagttgtatgcattgttatggcaaaatagcataaatgagcaactttgatatgtatgatatattttccattgccttttcagcttatcttctattttggtaatttatctcctccacaatgttttcacttttctgtactacaggtcattaaggatgagtaactgtagagtagtattctccatgccaaagtgtggctttgtaattcttgacttgacaacagaaaatataggattttgagaagcagggttaagagaatactgtatgtaggcaacacatttatccagcagaagtagcccacaagtagtggaatccaaaaactacccatgatacaattattcaaaacctttcctagctttccagagagttgaaacggcagagttttccagggtagacaaacatcacatttcaaaagcatgtgagaaatcaaagagcctcatttggaataaaatatattggctcagattctgtctccatatgcctcaaaaatcatactgcaaaaggactatggaagttttgactttaaaaagccattaggctgcaagttgggttaagaatacacgcatactaaatgacatcctgcaagttgggtgcactataggtagtctctaatccatgtagcattgtcttaagtttacttaatgccatttcaatgaaagaatctgagtttttaagacagtaagaggcaaatgttttagcagatatttgaaatagagctcctttgagaacctcccagtgaaataatttccccaaacctggaaatctaaaagtgccatccccaagaggttagaatgatgttcacatacttgaacttggaactaaagtatcatgaagaattaatatggtattcttcattcctatttattttagttaagacagggaaagtgacctaatcaagatgtcttatctaggaatttttgaattaaaatacagtcttctttccaaacatttattctgcttccctctgttcctacgtagtaggctggacaagagccctggcccatgtgacaggctcctatcctcctgcactcgaagggggtagggggataggaaataggagacctaagttttcatcctggcttctcaagactccttctaaccattgggtcacttcttttatgaaacttcttaatgttttactctatttttgcaattccacttctgccttcttggcttccatgatcctgtcatgttggagacacggtatacctgtgtacaatacacaggatattttaaacaaggacaaccttttcacatgggatctccctttaggttaagattcagtgccattggtgagaaataagtgatgttggtgatttaggagaatgatcctaaatccatccgttgattctgtttgcacctctgtcaccaaatccaaggtctttcctcctgtgaaatatactaaaaaattaattgaggcagacccataacccttctctattaaaactgtttttgtttctccttaccattgtgcatctctatgtctttctctggaaatatttcaaaataatttggagaaacattgtcaactatttttcattcctttagaaagattaaagtggccttggctagtgtggggaaggcactggctcgtctgagtttgttcgctagctggggtattgttaaatgagtgaacacttgtcactgctgctcgttgtcctttttttctcctttacaactgtctcaggccttttagggtacttcagtgtggtagaaggaaatagatggcttgataattgatttgttcctgctatattggttctatgtctcttataaagtagcaggacctgattctattgtatgtggtatcagtcagagttttgactgaacactgaaggcataaacagccagattttcaattagaatttaaggacctacttacagagatgtggacaggtttaggggagtgagtagctgatgttaaggtacttattaacccgccataagtctccccattcctgaaaaggaaggggaggtaatggagttgcctaagtttattaagagctgaaactggaggctgtatagaaactactcaacaagagctgttcttctagagagaggccattgccagaatgcaggcacagaaggaactcaaaagaaataccctgacttctctcttcttctgtgcagcagtagtgcacggggtctagtgagggagatctattggctcctgaaagaaatggtcccaacttgtccttttgcattttgatatgctttttgatggtctcctgatgttctatgacatcaatcagctggcatgtgtcacagccagccatgaacctgtctatagcagcaccagctcctagttctgaactcaactgttttcgttcttctatgcatttagaacagagataaccattactttagtcaattacttaaaaaatttttattgagcatatattatgggctaaatacaatgttaggaaggccccaaggatatcaaagtgaacgaagcaggaaagaaccctgtccttaagcagtttacgtctcaatttttttttccctgcctaaactaagactttaagaactcagagactcttctagaaatccttaatcttctgatgatttttttttttttttggtgctttgctcaattctaaacaattgagatgaccaaatcaataggtaaggtatttatttatagtactctattatgtatcgttgtcattcattcattcaaaaaattacttctgatcatctactatggttagtatatgtagaaattgataaattagtaaaatatcttagggtttagggttctgctcatctagctaaaagcagatatgcaaataactacaatggcaaagtgtcaagagcaagggactagcaaatgattccattgttttggatgagggtgactgagagttatggtaataaccataacacccaatttcctggctgctcagacgagcagtttaaagactcactgctagtaatgtgtgcttttatttaatgggaatcccgtaagtactcacttgtaaaaagcagggtttcccagaatccattggcacaaactgttcaactccttgacatacacacagaacaattcagtcacagtgttaacactgtttgggataaactatgtgactgtgaattagggaggtcagaagaaagtatgtttttagacatcattggatgtatactttttattcgtcctatagcctatactttagaaccatactcattgaaactgtgaaaaatgaaaccacatcatgaaaaagttttcctgataatagcattatttgtgtatcttaacggtagctatggactctttatagctacttaggaaatagctcttgtcatgtttccaaatctatatcttaaaatgctttgtctagacaagagtttgctgatcctctgacatattaaaaatggagctcagttctgttttttaatctgggactaaaaattttctctggcagtacagttttggcacacaatttggctctttctgtcttctctaaatgactttttgattctcttttccgttccgttgttttctggagaaaaggtgtccctgataaagataagggaaatgaatcttagccattttccgttaggagcactatcttcttcaggttcaccacaacatccacagagactggattcataccttagctctgactttgttaacaccagctcatcatacagatggtttagtactcagacaccaaggaggtctctgcaaggcaacattcagattctcctcatccacttacagatccatatttggaggttctcataaaaatcagtctcggggactgtcttattggaatttggggttttatttttaaaatatttttatttgtagtgaacgaggttgagtgtttatatactgtagaatgtacagtctattcaagtaactgggaaacagtgtaaacttatttttatatagtatgttggttatattttaaaatattatgcgtggtgtgttttcttttgtctccagacagcttttccagtgaaggacctttaaatgtaaagccatttgtcaaattattaatctaaaaaagtgaaacaaatatcttatttttcctgtttctggactttttggacattcttagtgtttgttgatcaactttctttttcagatgaaccattgaatgaatgcactgctttacgtttattgatccctcacctgaaaatatattattgaacattttgtttcaaaatatagcatatacagtattgaaaaataagtgtatcctgtgtcagttacctaatttgaaggcaacttgtgtgattttacccttttgccagattttccttacgtggttaaaaaaaaaaatcttgggagaaaacatgtattctgaagacattgaagtcagaattatttaaacaattctatgtctgtctcttacattatgcagttaaggtaagtcatgtcctttcttcgagtaataccagcggcacaggggactcaaaaggcattgtttccaaatgtttgccattttgatgctaatgataactattatgatattttaccttaataaattcttacattgtaatagggtatgattgtatcaattgtctagtggatttaatgcgtcttaactgtctggtaaggcagggaaaggattacctatcagtcagccaagtcttgtgctgtgacacattgaatcaaagaaaattcataatgttgtatagataaacacaaaagacttttgtttcttggtttctcactgccctaccttattgatttgcttttcttctacttctgataaaggcaatgaaatatctatcctgtatggaatagatgtgagttactgatataaccaaatgactgccaaaggcacagtgccactctccacatgacagcttgttacaggattcatctttcaacaataaaaccctacagcctttgcactaagctcaagcatgaaggatatcatgttatcctttcagcatttcatagtatcttttacttgggcttttatttgtctccaagtatcccttatcttgaataatgtatgtcactttctctcatacatacctatttttgtgatttcctctgaataaaccttatttatcaaggaaacattctccatggaccagtgtcctgaacatgaagctttgatataatggaactaaatgtaaattagaatttatttccttttctcctacttcaaacacatgcatcctttcccaaaatatgtatatatataccaaatctttccaggtgaaatctctcactctacttgtttagtgttctagaatctcctagagaactgttttgagtgtagtctacatgttacatacatgacagtaaacacaggtaggtgcttcaaaaatgttgaaatcacacatttgtgaactggctatgtatatgaggtactggcttatgcatttatttaaccatatgtcattattgcccgccttgtgccaggctctgtgctgagcactgggtctccaggcatgacatttcttttctcttagcaaagtggacagcaggaaaaggaagggtgctaatactgggaaacgtaaacaggtcttatgattagaattatgttcttaaaatgtattttgtactgaatttattttattaaacttaacattactttttttttcaaattaaagcaaaatgtaacatggtaaaacttaagaatctagaaagaaatgtaacaaaaagcaaaactttcttttctcttccccaaacctccaatgcttatttccccaaataaattttgctaatggattttgtgctttgtttcagagtaaaacaaaataaatcaaaactaaaaacacacaacatgcaaacatatatacatgcacacaaattgtattatatgatatattctgcacctttatatttttacttagtactatatctggtgtatcatcttgtagcctttttcatagtatgacatatttaccccataagataattttaaaattttgaaacgatctcaaaattacagaaaatctgcaatatagaaccaataagctttttcttttctaagtgagttaccctatcaccctggagcgctgtggtatggattttttataagcaagacaatctcctatacaactactaaaacaatcatcaaaatagacatagatacatcctatacccaatcctcagacctcattcaggttttggcatttgccctaatatagatagatatagaatccatttcaaaatcactgattatgtgtcattgtcatgcctatccagccttctttagtctggaaaattcctctgcattttgttctgtggtgttgttgttttttaattttcatgatcttgactcttgaaaattactgcccagtttgtgtttcctgctgtttcctcttgattgacttcaggttgtgtatctttggtaggaatatcatgaaaatgatgctatattccttttactatatcctatcagatctcaggtaattttaatttctcccattactgataatgttcactttggtcccttgttaaagctcatattttccaggcttttctaccataatcttttcatcctttataattaataagcattttatgcagaggtatttgaaaccttatgaatatctcattctttgtcaaactttccatttactcatttatttctatccatatggatgatggcttcctgttttattcaatgagttataaccccttactatcatcaattattttgatgtgcaaattttcccagattgggccagagggagttccttcaagctgcctcctgtgtccttttgactcaggagccttgtcattttttgagcacttccttgctatctgttcacagtaagacatttcaggctcattttgtactttccttatcccagccctgatgtcagcctttctctaagaagtcctggttgtttgtaatggagggtagtatttggaaaccaagatttgggtgttttcgggggtgttgctgctctcaaaccttcttagtggccagtgctcggagcaaacgtatatatgtgcatgcacatacacaaacatgtgcacatgtgcatccatttatatctgtcagtgtatgttgaaaaccatgactttacactgatacctccaatctgacaccacagagtatactcttattttctccctttccctatttataacttctccaagattgagaagctggttctcattatcctaatatatttatgaaattgatcaacacccctatgtaaccatctctcgttgccactgccacctttccttattagatgcctcctcatcccaactgggctctgacacaccacatggggctgccagcaccctactcttctacccccatgtggaagtcctctctattccacccatgcaccaataccccatggcaagctgagtcccaccccctagcatggacatcctcctcactccactcgggttgcccccatgtgtggatactttcattgtcctctggaggccctgactccccatgctgggcactgctctgccacagtcacctttctctgttctgttctgaccccccttttctaagtccccaagggtcccccacccccatggtgaagcagactataccttgctctgtttcatctaataactttagaaaggaattgctcaagaaaattaaggagagagtgaattcctataagatcattgtctgccagtattttaatttgaataatgataaaggaggaataaaaaaagtggcttagaccacctcatctctcttttctgagtctctttctctccccacagtgagagtaatcagtgattagtgatgttgttagtgtatgttttgcctttttaatgtaggtagtccttaacttatgaaccctataggaacattctgtatacttgaatatcttctcctggtttcccctatccctgggaactcctagccacatacctgctctttttgtttctggtatagctgctattaagggaaacctcattccaataccatattcactaacgcaggagactgtggtcctcttttgtcacttcttacttatttagagctcagtgatctcctggtcagactcaggaccaggactcagcagtatggtatagaggcatatggccggggttgggtaggagggctctagacagctctaagtagcaatgggctggacacttcagggcatccatagcatggtttgattttgttatatgcatgtaacaaaatgttgatgtaccacataaatatgtgcaaatattatgtatcaaaaaaaaaagattaaaggaacttcagggctcagggaatttgagagttcccagatagtatagtgacaactttagccacattaaggtttgttagattctttcatgctaactatggaacataggcaattgtatctggggaatgctgcagactgcaatagaagtttgcagctgttgggtgttctattcacatatagataatacatggtgtgggaggtttgtgctgctgggtgagtttgtgtcagcctgacccggagggcaggcagtctgtttctgtctgtctaaaagtcaaagctgtgacatctgacactgataacaaaaagtaatgtttgtatgaaattttaatccctaaaagtttgctgctcatgggttatagctttatctatgtctctgattgcatattaaatagtttataaatttattcatgcaatagatcacagaaaattttccccagagtaggacactcttgccattttaagcaaattcaaaaatcacatacctattgacctgattgtaatctgtttattcatgacatttaaactaggagcacatttttataaatgtactcactttgcaaattgtaggctacgattttaatttggcatgttaaagtgtctttcattacaccaaataaagtgccaagcccgtaggctcagagaacctgaaggttttacaggcagcaagtcagggagatttattttgggccctgggctgagggctcaggctgtcagcaggagctcatttattcattcacttattcagtggatattaatgagcacctcctgtgctcaaaatactgttaagtaggtaacaggatacagagaagtatgacatcaggttcagggttttttgcttatttgtttgtttgttttttgagacgtagtctcgttcttgtcatccacgctggattgcagtggcgcaatctcggctcactgcaacctctgcctcccaggttcaagctattttgcctcagcctgctgagtagctgggtttccaggtgcctgccaccatatccagctaatttttgtacttttagtagagatgggctttcaccatgttggccaggctggtcttgaactactgacctcaggtgatctgcccgcctcggcctcccaaagtgctgggattacaggcatgagccaccacactcagccaggtttaggttttaaaagatcactctggcagcattgtggaggatggaattcaggagaggtagtcaaaggcaggagagccagctagagatcattacagtgtttgggggaagaagctggcttgaggtggggatggcaatggaaagaaggagacagattataccctatgtggttcttaaacttccccagggttgtgagccactctcatcatcagatgaaaacctttgacctctacagagagaagagtgcatatgggcatgaaaaaaaatacagtttcacaaggcctgcccttcgttatccccatcaggaaaacagggcacaggcctggattctagaggtctcaactgagacccatcaatgagccctgccctataggacttcaggaaaggagagcacgcatcaggctgggctcatgagaaagaaagccccacagaggaaggggtacatgagctaggacctgagatgaggatggagaaggcactttagatcgcataagcagtctccaggcttttagcactgtgtaagtcttcatgaactatattgggagaaccataaagctcgagtcttaagagtaattggttcccaggggccacctcagaattcttcctcattacattatgtaatagtgcaaatgaaacccataatatattgcctgttaggtaggcctcagtcaatattagttctttttattattaagtacatcaaaatacataaaagatttgtgatgtgtggatgtttttccagattgatagttatttgacagtgatggcttaattgtatcagcagtccccagtattaggaataaaaatgggttaagagccagccctggaaggcttaacatttctcaaacacactgtcagaaattacaaagttctgctttgtaagattgggtgtcacaatacatgattcctggaagtgacagaatttgttccagctgccgtgctgagccacattaaagttagacgtttctttcatttgctgtaagtctaataaagtggtaatttggagtgtacctgtagtattttaatgtttttcacaaacttctctgccactaaaattctgacaaccccttctctgacaagagttctagagatggatgacactgcctcagcataaagccatctcttgccaataaataataatgggaaattatagtatgtatatatgttacatttttaaaacaggttataacaaactttgaacaaattatgtggtctatatgagatgtaacaaagtatataaaatgggactgtaagacaggaagttttacaaagtgaaatcaccatttcaaacacactgtggtcagagagatgctcaaagggatgctttttaggaaaataagaaaaaggagacacagcaagtgatggagtctgtgagtaatgagcatgtttatttgatcaggtgatgggctgagactttcttcaggttttattttagtctaacgtcccagtcctaccacctataattcaggaaattataggaataaaaagttgccaaaattatctttggaaaagttggcaacttgatttgaactttcacaatgagagtaagtctttcactggaaactgtttgaaatacatatctctcttaaattgagttttaaaagatttgtggctcatagaatatataacaaagggcagcttttctgttacatctatttttggtaaatatcaacaagttgataacttcgatgcagagcatgttttgtacagtggctgtgtgcatgcattttgtagtctgattgcgatctagctatatgacagtaaaagtttaggacctaactggtaggattgttctgaggtttaaatgagataattgggtgtaaaccttggcaaggggctgaagatagcaatcattcaaggcaagtgaactgctaacattaccttcatcgaatgctggtggcactaacaaagcgagcttcaaaatatctaggatattttgaagtgatgatagaatggattatgtctgctttcctatatagtagttagaagccaaactggaagcaaactccaggatttcagattccatattctttttgccagactagcagttctcaaatatggttaaactttagtatcgtcagggaaaatagttgtggggtggggggtgttttgtttgtaagagtagaatcttctcagagaatcaaattaagcagatttagagtggtgcgcaggattttgaatgtttttaacatttataaacataacatttattgaagtatcatctgtgagctaacattgtgctatatgatttcttttcattttttaataaacaataaaatgaacttttttgaactaggagttttgatacatatatatagagagagattcatgaaactaccaccacagtcacaattcaaacagttccatcactctaaaaacttattttgtcctatacccttgtacttacttacactgtctctccatccctcacccttggcaacaactatgctcttctccaccactatagttttaccttttccagaatgttacatatatggaatcataccgtatgctaccttttgaaactggcctcttttgctcagcacaaactctttgagattcatccttgtttttgcaggtataaatagttcattccttttttattgctgagcagtatttcattccatttgataacacagtggaactagatgagtggtccttttggaaacctcagtaacaatctggaatctgaaactgtctcagtgaattttcatactttattacattaaatgcattggtctgtctgcattttgaatggatcttttaactatgtttgatactgtaatttcttgcattgatcatttgaagaatattggttttctgaaacacacagatcatctaaatgttgatacatttccttatgtaatactgaaaacaatcacattattgacatcatcaatgtatttaagtattgagaggttgtcaggctcactgtggtgaatactagttattcaaaatcttgttgctttaaagtccgaatgttgtaattgaccaaaaaaaaacaaaaatagtttcccttgaagtgatagattcacttcatttatttttgagaaaatgtctgtcaaatatccaaatcttaataaccatagcttgtctgtgaatcactgttttgagagaaaattgtgttctatcagaaaaggatctaggtcagctcacaactgaaacagtcattcaagggctttttgttgagacagtcatgatacttccgcatgatacacagcagagatacttagtgcatactttccattttgccacacagaatattcaaaataggtttactgaagggttgagatttaatgaaattaatcatttttactactttatccaaggacattcttaagagaaatttctttttctgtttaaaattataagtatatggtgataaagacaaaaactattagtaggttggcagctctgcctttactcttcctaaggcaccagcagttttacacactattgtttttgtatgatcagcacaaatagtaacagtgaaaaagacaaataaaaacagtgttattatgaaaatggttttctctttgaagaacttctgaaggtgtctcggaacccttcagggtctacagactacacttgcaaaattgctagattatgcttcatgctggttcgaacaagagtaactaagattaatatagaaaatagtttctatgagaaaaaaaagaggaatggagttgttgagacaggagaggacatggatgaaggagtggcttgattcatgtcttcaggtgtatgagttagttgaagatcacttgttctccatgtttgaggatgtaaatgaaactagaggaagaacattattgaccatcagaagggaagctgatgtgtcttatgccctagagatcttcaaaacagactcccatttactcccttaagacatctgttattttaaatatctgaaggtagaagacaagaccaaatgattccgtgagattctaatattgtgattttgtggtactaaggatgtgtggcttataagtatacctatctttattgtagacatttttttctttcagaccaaagttttcaatatctctgaaaactcaatttcattctaaatcagtcgtcagtttcatatggtttctcagagccccttgcaagatgctgtgcttaataacttgcccattaaaattgaatcaaaccttgagacagacagtgctgctaagggagccacacgttgttcccacacatgctaaggaataatgggaaacagataatcattaacagatgtaccttcttcccaccttcatcgaaagcatctcaggacacaagagagcctctgatcattgtccattctacactgtggcttctgggacaaaagggctcgtccttcctttagctcagctacttcaagggctgaacaagatttgctctggtaagatttccctacagggaccagttggctgtaaattgattttttttttacttaagggttatgtcatagaattaaaagtatcataagtagattctgaatgtttaggaaccatagaggttcaattttgttgtatgcatgtgaaacataatgcttttaggggagaaaatctaaattatattttatatttataaaatggtaatttccaagagtccatttctgcttcaagaaaagtcctacagtttgtcccttgaactaacaagctgaagtacagctgcaaacaaagctgtcagaaattatctgagtctgggaaatgaaactgtaaatgcaccttagcctgtataaagagacttggagaaataagttctatttcagttgttttgcctgcagaaaaatataactgcatggggaaggtgtgagaagggcaattaaaagtgagtgggtgacattgaagtggcaataaccagactgattaaaaagattagaatgtcgttccttcaggctaaaaaaacaaaggaatatgattgaagactataaaacgttttatagcagatggctaggaccaaacacacctgttcatcaaatctctgtaaagcagcacaaagaaaaacctgtggagttctaagtcagaaaataaaatataacaaataaaaagaatcttttttatgcagtggtcacattatggacataatgtagatacagacctctaaaaaagattcaaagaggatttaggaaaatttgtgctgaatagatccataataaaagttaagggaaaataactcttttcagagagaaagtacattcataactttgaaactggaaatcggagaaaagaattttgtgccaaatgatccatgtgtttgacataggtggtgtttattataccattgtgttcacaaagaagaaactgaaaattgttcaggctaacgttaaaatatgttacttaagattttttttgttgttgttctgttttttactcaattaaccaagtgtaataccaaacgggacctcctgagttcattagtttattccactgctccccataagctgtttcaaagcagcagttgtcttattctttccacttagcaatttgctgatcatcattttcaaattgaatttaaatggcttccattataattttctttttattttgatcaatttcaaaccatatcctactgcaagaattgtacaagaaaatacccatatactccctcatataactttattaaatattagtttttccacacttgcatttgttctcttactctctcgaactctatagaatgttgattaatgtttcatatagttttgttcatacatttatatatcattaatatgcgtatatactcatgctgaatcatttgagaattattacagataacaagacacttcactcccaaattcttcagcatggacatcctaagaacaagaacattctctgcaaaatacctgggaatattgataaagtagtagtgatagagtactactatatagcctgccgttttgtcacatttcctcaattgctacaataatatcatttaagtaattgttttccaacctaggatccaatccaggattacgctctacatttaatggtcaggtctttgtgatctcctttaaactaaacagttcttcaacttttgttgttgttgttgttctgtataacatttacatttttcaaaaatctaggctatttgttttgcaaaatgtccttccttttggatttgtttgattctttcctcatgattagattaagattaagcatttttggcaggctatctgcacaggtaatgctgtgtccttcccagtgtcattctcagagtatgtaagatgtcaatgtgtttcattactggcaatgttgagataaagatagtgtctgcatgattgcttcattgtaaagaaactttttaaaaattcaaacattatctgcacagtgatactttgaaactttgtgaatattctgtttcccagatttttccctagtggttttagcatccattgatgatcattgcctgaattggctattactatgtgatagtgaaattctagttttctgtttctaccattacttttacatgtattagttcatttgcctggctttccctccttcctctacccttaaatttttagaatcactgtgtacttatggatatattttttcttttttactattacttttttagcttgataattttgttttttctcagatttattaaggtataattggcaagtaacttgtacaatattatattttgatatctgtatacattgtgaaatgattaaatcacactaacacattcatcaactctcacatacttattttttgtggtgaaaagatttacagtctactcctttagcaatttcaagtatataatacattattattaactgtagtcaccatgctatacaatagatctctgggactccatcctgtctaactaaaccttgataccctttgaccatttttgatcatttcatttttttcttttctttctccccctttttttttttttttttttttttgaggcaggatctcactctgtccccagactggagtacagcggcaccatcttggctcactgcggccttaaccttaacattctggactcaggtgatcctcccacctcagccttctgggtagctgggactacaagcacataccaccactcttggaacaattttttgtattttttgtagagatgggattgttgtcatgttgcccaggctggtctcaaattcctgagctcaaccaatcaggctgccttaatctcccaaagtgtttgaattacagacatgagccactgaccctgaccatttcccaattcaatagtattataatccatttctgtaatttttcattttgatactcaaattgtgccagatgtgatcatcagcaggagcccttctgagttggcttgtttcttttcaacttgttctcatcagtttgagctcatcccccatggtacattcagatacttcagccctaacttggtcccatccctggtcccttttagtagggagggaatggtattcagaaacccaaatctagatagtcggtttgcgtattgctcctggagtggcttgcttctaggtcctctcagtggataatagaatgaacacacacatacacagcagtattatagccatatggtatagtgttgctatactgctaccctcaatttcatttcagcattactgggtctacatttcatatttgcatttccattctcccaagtaagaatcctggtacaccacaatatcaacatatttatttatttcctcagtcctacaacacacacgaaatagtttcagatttgctacaccgggactgctaccaagaacaaacttactgagccagattcgaaaattcttaaaattctttttgtccttagaatatttgtctctctacatatagtcagaagatttttaaaaaataaacttgtaaattagttcttcctttttcttctaacaagttgatagaggcttaggggttttgttgtcattgttttcatttgattttgttgtgataagaacacttaatgtgagatcgacactcaacaaattttaagtgcacaatatagtattgtaactataggtacaatgttgtacagaagacctctcgaatttattcatctttcataatcaatttttctcatatttgttttttaatatagtctattgaagaattttttccaacgttgttgatttaatctgttttgaatatgcagataaatgctgcttttaagtgataagaaatctaaatgttacattgccagctatacgaaaatccagtccaaattcagtgttgtcttcatacgtgtgatctatttagaaacttaagaaagagaaagcataaatatttttcttacttgtactaacaaagattttaattattattacctctccaactttaaaatcaagagttttttcaagcatactaatactgcagggcaatatggagcggtgattaacaatctgtctctgggattagattgcctaaaggcaaatcctggtccccaccccaccccaccccacatttgctagttgcaaccaggtcaagtttgttatcctttcactgccttgtcctcttcatctgtaaaatcaggatactgcaggcattcggtgcgatgcttgatgaatagtaagtcccaaataaatgttacctgtgatttcagtggtgatgatgttcaatttgaaactgtattctagatatccagagttcctaatactaaattaaagactttttttttttcttggtaactgggctttctgtgggtttgggagttgtttgtttttctctatctcagtacttttgatgcataaggaaaagtcaaagcttaactagaagttttggcattgagaatgaccttgttcttgtgttgaagtgtctgaaaaataaaaataaaaactccccctataaaatcccagtcagttgctgctgctggtcctagggcaggctatctgtgtcgggatgccgagcattactgccactataatcactgaggcatctgccagagatctcatggctgaaaactaggtaggaaagtctgtattatatctaataatagctctggaaattttcctgaaatatttgctggcaactcccaggcttgacagacatagattactataactagagcaaggacatcatttctcctcttgctagtgagtatgctagagtactaatcaaaataataactagaaattacttgctatgagttttttatgtttttacttgtagtgctcttgggtttcagccaagagtggctagatatatttatatagatgtatttttaatacacaaatagctttttataagctgtagattcatattaactattcactccaccaatgcaataagaaaaaaactatatcgacatgattactcttttattccacaaacagtgtaaaattatgtgcttggcttctgtgtgtgtgtactgaggactcctgaggatgcagtcaaagagtcaaagttaaatattaaaggaattgtcaaaacattcgagataggaaggtcaaaatgctttgattaaccattggaaaagattcaacagtgaggtgatgattctctcaagacaaatgattgctgtgaagccaatgaagcttaaacttcaggggccctcacttgtatgggttcttccaaggccctgagagggcctgagaagtgtgtccacgtgatcatatgttttcgtaatatttgctaaagtgagggattttaaccacaactggctaagacaactgttttgttccattccagcttttccttcatctcacttttcctcatgttgggtggtattgggggtagctttgggcagaagagactaagggtcgcagatatatttactcagagtttagtgggatgtgcataaattctgcagtcacttctgtgtataattaagctattgccagccatgccagcgaaggaatggcttctagattctaccacacactcagctgactctcccagcaaggacagtggctatgttgtattatgaatgtactctacagcacccagtcctagaagtatgtagtcagtaaaggagaaatggttattgcaatgtacagaaccagaagctattctgtggaaaattttcaaccaccaaacatgtaaacttgcaactggatgattttgttctaattgatctctaataaaaatgtaagttctcacctatcaaaaatatgctagataacatgctggtgtatacaattataaatgcatcatacattttttctttgggggttattgcttaaaatagaatttacatattttataaaactttatatgattttaaataaatttataggataaaatttctgataaggcacaaaccataagagtcctacaaataagagtatgtttgtgtaggtcacaagatcttatgtgttccaactatcaaaaatttaggtctggtcaatcgcaccagaggaaagactgaattatctttctcatatctttaaagagtgatatcacaaaattattacaatatgaaaaggggatcaaagagtaggcaaccaaaaaatgtaggaataatatagaagtatagcaggcaatacatttataaaaatatttttcatattttgtgatttctatatttctagcttttttatatttaaataacttgctatgatttctttccctcaaccttaataaatattcactttcttgcctaattttgtatttgggatttcatgttaattttctttttttattattattatactttaagttctagggtacatgtgcataacatgcaggtttgatacataggtatacgtgtgccatattggtttgctgcacccatcaattcatcattcacattaggtatttctcctaatgctattcctcccccagcccccccaccccccaacaggccccagtgtgatgttcctcactctgtgtccaagtgatctcattgttcaattcccacatatgagtgagaacatgcggtgtttggctttctgtgctcatgacagtttgctgagaatgatggtttccagcttcatccatgtccctgtaaaggacatgaactcgtacttttttatggctgcatagtattccatggtgtatatgtgtcacattttctttctttcttttttttttttctgagacggagtttcgctctgttgcccaggctggagtgcagtggcgcaatctcagctcactgcaagctccacctcctgggttcatgccattctcctgcctcagcctcccaagtagctgggaatacaggcacctgccaccacgcctggctattttttttttttttttttttgtatttttagtagagacagggtatcaccatgttagccaggaaggtctgaatctcctgaccttgtgatctgcctgcctcagcctcccaaagtgctgagattacaggcgtgagccatggcgaccggccatgtgccacattttcttaatccagtctatcattgagggacatctgggttggttccaagtctttcctattgtgaatagtggcgcaataaacatacgtgtgcatgtgtctttatactagcatgatttataatcctttgggtatatacccagtaatgggattgctgggtcaaatggtatttctagttctagatccttgaggaatcgccacactgtcttccacaatggttgaactaatttacactcccaccaacagtgtaaaagcgttcccatttctccacatcctctccagcatctgttgtttcctgactttttaatgattactattctaactactgtgagatggtatctcattgtggttttcatttgcatttctctgatgaccagtgatgatgagcattttttcatgtgtctgttggctgcatagatgtcttctttttagaagtgtctgttcatatcttttgcccacttgttgatggggttgatttttttttcttgtaaatttgcttaagttctttgtagattctggatgttagccctttgtcagatgagtagatggtaaaaattttctcccattctgtaggttgcctgatcactctgatagtagtttcttttgctgtgcagagctctttaattagatcccatttgtcaattttggcttttgttgccattgcttttggtgttttagtcatgaagtccttgcccatgcctgtgtcctgaatggtattgcctaggttatcttctaggtttttttatggttttaggtctaacatttaagtctttgatccatcttgaattaatttttgtataaggtgtaaggaagggatccagtttcagctttctacatatggctagccagttttcccagcaccatttattaaatagggaatccttttcccattgcttgtttttctcaggtttgtcaaagatcagatggttgtagatgtgtggtattatttctgaggcctgtgtcctattccattggtctatatctctgttttggtaccagtaccatgctgttttggttactgtagcctcttggttactgtagcttctaaatatacaatcatgtcatctgcaaacagggacaatttgacttcctcttttcctaattgaataccctttatttctttcccttgcctgattgccctggccagaacttctaacactatgttgaataggagtggtgagagggggcatccttgtcttatgccagttttcaaagggaatacttcctggttttgcccattcagtatgatattggctgtgggtttgtcataaatagcttttattattttgacgtacattccatcaatacctaatttattgagagtttttagcatgaaggtctgctgaattttgttgaaggccttttctgtatctattgagataatcaggtgtttttgtcattggttctgtttatgtgatggagtacgtttattgatttgcatatgttgaaccagcctttcatcccagggatgaagctgacttgatcgtggtggataagctttttgatgtgctgctggattcagtttgccagtatcttattgaggatttttgcatcgacattcatcagggagattggtctaaaattctctttatttggtgtgtctctgccagactttggtatcaggatgatgttggtctcataaaatgagttaggaaggatttcctctttttctattgattggaatagtttcagaaggaatggtaccagctcctctttgtacctctggtagaattcagctgtgaatctgtctggtcctggacattttttagttggtaggctatcaattattacctcaatttcagagcctgttattggtctattcagagattcaacttcttcctggtttagtcttgggagggtctatgcgtccaggaatttatccatttcttctggattttctagtttatttgcatataggtgtttatagtattctctgatggtagtttgtatttctgtgggatcagtggtgatatcccctttatcattttttattgtgtctatttgattcttctctcttttcgtctttattagtcttgctagtggtctatcaattttcttgatcttttcaaaaaatcagctcctggattaattgattttttgaagggtttttttgtgtctccatctctttcagttctgctctgatcttagttatttcttaccttctgctagcttttgaatgtgtttgctcttgcttctctagttctttcaattgtgatgttagggtgtcaatttgagatctttcctgccttctcttgtgggcatttagtgctataaatttccctctacacactgctttaaatgtgtcccagagattctggtatgttgtgtctttgttctcattggattcaaaaaacatctttatttctgccttcatttccttatttacccagtagtcattcaggagcaggctgttcagtttccatgtaattgtgtggttttgagtgagtttcttaatcctgagttctaatttgattgcactgtggtctgagagacagtttgttgtgatatcaattcttttacatttgctgaggagtgctttacttccgattatgtggtcatttttagaacaagtgtgatgtggtgctgagaagaatgtatattctgttgatttgaggtggagagttctgtagatgtctattaggtctacttgttgcagagctgagtcaaagtcctggatatccttgttaaccttctgtctcattgatctgtctaatattgacagtggggtgttaaagtctctcattattattgtgtgggagtctaagtctctttgtaggtctctaaggatttgcttagagacctgggtctctgggtgctcttgaaatgggtgcatatatatttaggatagttagctcgtcttgttgaattgatccctttaccattatgtgttggccttctttgtctcttttgatctttgttggtttaaagtctgttttatcagatactaggattgcaaccactgtttgttttttttgtttgtttttgtgttttttttgctttctatttgcctggtagatcttcctccatccctttattttgagcctacatgtgagtttgcacatgagctgggtctcctgaatacagcacaccgatgggtcttgactctttatccaatttgccagtctgttttttaattggggcatttagcctatttacttttaaggttaatattgttatgtgtgaatttgatcctgtcattatgatgttcaccgtttattttgctccttagttgatgcagtttcttcatagcatcaatgggtctttacaatttggcatgtttttgcagtggctggtaccagttgtttctttccatgtttagtgcttccttcaggagctcttgtaaggcaggcctggtggtgacagaatctctcagcatttgcttgtctgtaaaggattttatttttccttcacttatgaagcttagtttggctggatatgaaattctgggttgaaaattcttttctctaataatgttgaatattgaccgctactctcttctggcttgtagggtttgtgcagagagatccactgttagtctgatgggcttctctttgtaggtaatttgacctttctctctggctgcccttaacacttcttccttcatttcaaccttgttgaatctgacaattacatgtcctgtggttgctcgtgtcgaggagtatctttgtggtgttctctgtatttcctgaatttgaatgttggcctgccttgctaggttggggaagttctcctggatgatatcctgaagaatgttttccaacttggttccattctccctgtcacttttaggtacaccaatcaaacgtagatttggtcttttcacatagccccctgtttcttggaggctttgttcatttctttttactcttttttctctaaccttgtcttctcactttatttcattcatttgattttcaatcactgatatcctttcttccacttgatcaaatcagctattgaagcttgtgcatgtgtcacgaagttctcatgccatggttttcagctccatcaggtcatttaaggtattctctacactttttattctagttagccattcctctaatcttttttcaaggtttttagcttccttgcgatgggttcgaacaccctcctttagctcggagaagtttatgaccgaccttctgaagcctacttccgtcagttcatgaaagtctttttctgtccagctttgttccattgctggcgaggagctgcgatcctttggaggataagaggcactctgatttttagaattttcagcttttctgctctggtttctccccatctttgtggttcctctacctttggtctttgatgttggtgacctacagatggggttttggtgtagatgacctttttgtttatgtcaatgctattcctttctgtttattagttttccttctaatagtcaggtccctcagctgcagatctgttggcatttgctggaggtccactccagacactgtttgtctgggtatcaccagcagagctgcagaacagcaaatattgctgcctgatccttcctctggaagctttattccagagtggcagccacctatgtgaggtgtctgtcagcccctactgggaggtgtctcccagttaggctgcacaggagtcagggacccatttgaggaggcattctgtccattctcagagctcaaacgccatgcttggagaaccactgctctcttctgagctgtcagacagggacatttaagtctgcagaagttgtctgctgccttttgttcagccatgccctgcccgcagaggcagagtctagaggcagtaggccttgttgagctgcagtgggctccgcccagtttgagcttcttggccactttgtttacctactcaagcctcagcaatggcagacacccctcccccagccaggctgctgcctcgcaattcaatctcagactgctgtgctagcagtgaacaaggctccatgggtgtgggacccgctgagccaggcatggtagagaatctgcttgtctgccagttgctaagaccttgggaaaagcgcagtatttgggcaggagtgtcctgtttttccaggtagtctgtgacggcttcccttggctaggaaagggaaatcccccagccccttgtgcttcctgggtgaggtgatgccccaccctgctttggctcatcctccatgggctgcacccactgtccaaccagtcccaatgagatgaaccaggtacctcagttgaaaatgtggaaatcacccgtcttctgcattgatcacgctgggagctgcagactggagctgttccttttcggccatcttgcaatttcatgttaattttctaaaagagggtaccccaaaaattgtttagacttcaggtctctgaaaatctgaatttgcccaatgctctattcatatataagggatgcatacagtgtagttttttagacagccactcattcatatgtttgaggttatcagtaaaatgttaggttatgagtaaagattatattgtatactttaccatgacagatcctgtaataaattggcaacatttgctctaagtaataaaatttcagatgctggctgacagtactctgtaggtgtcatctgtgttctgtgagggctcggcctgttctggctgagaatttctcctagacataatcagtttcaatggtgggcagagccacttcccattgtaagaaatcagtctcctcctaaaaatgtctatttctaggactgggtctggaaatttataagagcctggaatatacctgaaagcaaggaaactatcagaaatactggggtcatgtcaaaaagacacaggaaataatttccaataatcaaaaaaataatgactgcaatttatggaaacacatcaaacttattaacatctgttagtgcataatgatagcaaaaagttttaaaaaagaaaataagctttctgttacccttgaaggatatgagggtataaattcattctgtaaactgatgagtaaagggaaagaaaacatttatgctgtcgttcctgtacaaactgtaattcagtttgttaaccaaatagttgatacgtaaaatgtctgctctacagaagaattccagccaatacatggagaaggaaaaaaagacctaaaccatcactcttttgtcacggtttctcaactaatgaatctaggaaatgatcatcaattactgcccatacaattaaatgaaaggttgatggagaatttttataagatgaattaggatgagaagaacaaaacctactaattagcaaaagaaagacagcagaaattactcaccttctgatgtgatatagaagtacaaccccactcatgaaatatacttgccaaaaaataggacatgtatctgttcaaacctctaggtctacccattttcaagaaactcagaagaaagaggaagatgtcacatgacaccatggaaaccaatcagcaaaatccaaaatgtaagacattctacaggacaaatgactgaaataagtggcaaaagataaaaaagggggaggactatcaaaaaattaattaacagattaaaataaattaatacttaaagacatttcatccagatagtctggatcttgatttgaacaaagcaactttgtaaaaaagaactttgagggagtcagagaaggttaaatatggaccaattattagataatattaaagaattactgataattttaacatgcgataatagtattgtgataatggttaaaatgagcttatctcttagaaatacaaactgatgtatttacaaataaaatgatataatgtctgagatttgcttgaaaataatccagctggggagaaggaaaaaaacatgtttgaaaagtacaatgaaataaggttggccatatgttgataaatattaaatctcgataacagaggcatgaggatttctattattgtaactacttttagataactaaaatatctaagtttgtttcatggtaggcaaagagacatagaaagtaaatgtgggaagcaaatgctgaaatatactctacctacactttcttgctactatttgtttttggaaaaaaaaaacttgatcaatagaaacacccaattttgacatttgtaaaatattaaatacaaatattataggcagtagtgtgctagtaaatagctctctgaagaaaaaagccctgatttgtagtatttaccagtttgcaacatgtgaatactcccaccaaggctgatttcaagctattgatgggacctcgtggaatgtggagttgagaagagatgtgtactctgagcagccagctccagcccacatctggagagatgacagataagcattagtttctggaatcacattatggatcttgggtaagatcccagctctaaagtgaaccctctgtttcctcttgttcagctaagtttttctgagcattagtttccccctcttaaaatgaggataattcctactacatcaagacaaggattaaatcagatcatccatgttatggacctagtatggttccagttgcaatgagtgatccttcatgctaatatcgtttcttctcttcaggttaaaatagaagggagaagaactcttggtctggggcagtttcaaagtttcaaatgaagggaatgaagctgatcatcttttcagaaggcttcctgcccagaatttctataattagttaaaattacaggtttcaggcacagtgtcacaaacctgccagaaactcaccaagctctaatttggttggatattaattggtaggctaagaagtgaatgtgatatgattgcagctagaatagaactatttgttaaaggtaggggtttctgtccaatgtgatctggaattgcaagtacacagtaacaattaagtattatcttagacttgacatggtgaaaagattataactttcctaatcttcttctggggaatgttgaggcccagaggagatgtttctggcatgaataagcctaagggttatattggaacattggaagtgtttccattcataattttgatcatgtttcaacagaattattaataatagcattttacttcccaaattctttaagttgggtgattaacaacgtctcagttcatgaaagagggttgggtcttttttttcttttgctttgcttgctgaataatttatttctttagtgaagaaatctaaggttaaggtaatcactgattagtctctaataatgcagttttcaagattactgaattatatgcatatacaaatgtttttcagtttattataactcaggctggagaaaatctgaattataagttaagcccatttttacaatctgcagacactaatactaaaagcatttgaaatttgatttacgtatctgggttgatgtgttcctactgggaatacaacttaaggatgtattttcccctctaaggaagagttgcatgaatcataaatctacgtattttggatttctgagcaaatacttaggagataagaagcagtatgctgtatcctccatctgaggcagtgtgctgtatcatctatcccatctcctttgatctttaaaagaatagttttaccctcagaaaattaaaatatttggccattggaaatttgaacttcctgttttcttaaaacagtactatttatcataaattcagtggctcctaagaagtatgttttaagaaagaaaatggaacaaaatagaaaatattagtatgccacacatagaaaagatactgttttgtgaaacttatgtttcaggtgtgcatgcatgtctatgtgtatacattctgagttgtgaagtaaaatttacttctgaggcatgttaaaacattgatgctttaaaatgtacaataagaaaagttactgaaaataaaataacagttctccattttgtgatctatacatccttgaaatttttaaaataaagtcatcctagatttagaagtgggcagggtactgcctaggcattaggagacagcagagaatgagaggggagttgcactctttaggagacatgtttgtgaagatgcatcttgtgtctgtttttattttatccttttaggcaggaaggatcttactacatgacctgtccatccattttatatttatgtagatatatatgtaatttatatacacatacataatttagtataacatagttatgatatcgttttccttgtaccagccctattatctcaattacatttcaagacttttgaggtcagggactttgccttagggatctggcatctttccacccatcaagcacctcacacacacagtagtatatacttactaactgattattgttaatagtgaaaatggctaaagttcacccaacattatttagccacctttattcatctgtttatatatttatgcatataaaaggattgtagccgcttattaaggcatgaataaataagaaaataatggctgaattgtcaatacaaataaccataatatataaaaatatatacatatgtaaatatatatgtatttatagatcataaaataagtaaggctagaggaaaaaaatataaataatcaggctctaagttatttcatagttctctctctcttagtcttattcttgcatctgaacttcccagtaggcaaagtgataaagactgcatatcagttacatgaattcttattaaagaaaaagagagacactctcagggaaaacaaagattttcattgtatacatggccaaaaatcatttctcacatgaagttttatggaggagacagtgagtctggactagaaaatatctacatcaccactccaggtaatggattttatttctcagtttcttctgctcctctgtaaatgctgaagactatgataaaatccagcaatctataagaagacaggaaattatggtccagtatagaatcttttgcctattctaatatcacttgaacatttagaagaaattgttcaaacaattctccccagataccacctatcacaaccagaatttaacggaactggatggtagagagtataagattacattccctagcaagggcctagatgataggcatttatgattgttggttgaaagcaaattcatctgctttagaaaaaatcatgactaggggttctggtcaatatcctttggtagaaattagcaagtttaccgacttccctatctgagtgatgggatgagcaattctacctccacacaaagatgagccattctgcaacaaatgttttgaaggcttgaatccacagtatcatttcagggcagtttcaaagcacatgggaataattttttactcgtattttgctttatctcttctctagattactgctaatcaccagcttttgctgattctagtagtactattcttgcttcatgtatgtgaggaggtcctattagttttcctacaacaatccacaattgagttagcagtaaactagaaagacagaagacctagtatttggagcaccaaacagaaatattaaaatggttaggtatttgtgaaatgtctactttgtgcagaggtagaagaatcacttctacaccttgaaagttcatagtaaagaacatcctagtaaagataagccacaaaatgcgggtgatggtggggagttccagacccttctgggaagaatcactgtaagaagccagggattaagcacagctgatggggtacagggtgttggacttggggaagtggaaagatagcaaatacctagagaaaataaataaaggtgtatatataggaaagacctgataaatgttactgctaatttacttgaagtgcaagtaggctcttaaaaatgagaggtgagagagaaaggaagagatgatgaaatgagttgtacttgggctggttctagtgaacctaaggagaggtgatcttgaggaaagcatagaaacaactaccaggctgccaatttttaaaaaatatggttgcagatgaaagcccctttagaaggaaacataggatattctctaacttttttaagtctaacaactcttttgaaaaagaaaatgtttggctataatttatttgtaaaatcagaaggtttagttgttagccaagaaactgactggctgtttgcagcagaaaagaaatttgttgaaaaggccttggggagctcatggaaacactagaagcctgcagaaccaggttcaggacattggagaaagcaaaggtaagcagggaagtagaaccagagcctggattcatgccatgaaacccatctggtaagagcagggctgctgatgccactgagtactgcctaccacagttgcaccccaccactggactacattcctgccccgaccgtatcttggagataggatgcatctgctgctactgtgccgtcttcaaaatggcatcttccctgttcctgcctcttgatatcactagttcaggattcacggggtggaggatcagggaagggggataaaatatgtccgatcagctgagtctaagtcatgtactcacatcttagcctcaaggatccctgagaaagtgagagtttagccatttgtgctctcatagtgagaagtgtagtttgtcttctctcaaaacttatgaaggtgcagaattcctagggagacataggtttaaattctgggaatccaggttaaaaaaaaaaaagacaaatgtccactagaatttcctctcaagctttcatttactcttgagttcttgattgatttttggagctaaattctccggacctagaaaaggcaatccagtgaatcttgattttctgttctagtttaaataatgcaatccaaacatgcctcaagccattgccagtttgaagatccagttaagcctcaagtgcatcacaacttcttagcgccaagtgccaacattttcagttttgacattaaatttattcttttgttggtgcttatattttaagtggcataattgaaaatgaatctaaatgtgtgagattttagcttgtgtgtgccctctgaaggctttcacgaaagccttgataatgatggtagtgcatgaactggccctcacaggtgccagtgttgtaggcatgtccctccctttgctaggcaccctgccagccaccactgtcctctctacagctgcttctctttcagagtacaggcaaagctcctttctgtctcctcttagttgacaatgccagttacagaaattcatgccagaccacactccaatgtgatagttgtacaagtggagacatggaaagattatcaaactagttgtgattaaaaatttttattcttatatgtgtggcttaaaataacacaaggttctggaaatgcagagtaaataactgctataagattctaaaatacatagctggaacctaagtaacttctataacccttcctgggaagatgccctcccaagccattctagcctaaacttagaaaataaggtttatttttaactttgttacctctctgagttattccaggaagatttttcttagggattttccagtgtcattagataccacagacagagtatgtgctgcacaaagccagattttttctgcattatccttgaagataaatccaggaaactccatgggcttactgtttataccaacccaagctaggctaaaagatgtcagggtgatgatacatctgagaatgacgaccctgaatgagttctgggactgggctgttatactacatttttattaatagttgcacatcttgagatctgattcatttctagtcataggcctttgagccttactaatttgcataagggctcagagccatgctaattttttctttttatttgagtatattttgtgttaagggaaaacaagcaaatagatttttgataagcaaatggtggccaggctgaggagctgtaacttgtaactaaaaagttacagcttagtatacagtggaagagataaaaatcctggtaaattggtgacttcagtgtctcccttgtataattttgtagtttttgcaagattcagagatgctaaactctcatcatgttgtcaaattgaaggtaatatttaacatgaggcaagtctttctaccattttcatcagtggcctaaaagaagatagtggattttcattttgtttccgaagtaattattggattttcaggttgcactgaaaaatgtgatcaaaggtgtgacacggaggtgattcactgtccccaaaacataatcccaaaggggcgactgaggagcagaattccagatgaaatcttgtttcttatgtgccctctcacctagacctgctgtaacagggaggaagtaaaggaaggtagggagaaagggaacttacaggggtgtgatgaaaccagctctcactggcttgggggaaccaattgcatgcatttctttgcaaacttacgttaagtgacatgttgatctttaaaatcagccatgatgggaataatttacactatagacattggcagtgctacaaatcacggctccctcttcccaaatactttgttgttaacatttattagctttccactggtgacctgctgttaaaaggaacattgtgtgtcacaaccttaacattattaccacttcttgattctgagttttcaaggtatgtaaaatttataaagacctagactatagcctatctttcttatacctttgtgtactaaagatattccaggttggaagaatttgttctctattttaaaattatccagtatgcctttgtttcctgtgctattttaacttgctagatttcctcaattgcatagttatctttttccccctcccctttttttctaccccattcttggttatcctttcatgatttcttggtcttctcagtgtagaccctgatatattatgaagtatttgtatgcataccacctggttagtatgatccaagacatcaagtagtattatagactctttcaattcagcaaacacactaactatctcctttgcctaagacactgtgccagagaaaataaaggacagtatctagtcctcaaacaacttgaaatctagggaaaacaccagacatgtatacaactaagactagtgcagagcataatgtgaaagatgctttttaaaaaagtacaaagaaaatgcaaactgaagcacagagaaaagagattatttctgaatgcaaaaattagagaaggcctcaggaatacaaagccatctcaacaaagtcttaaataattggtatgcatattgaagctgaactttttagttttttatgaatatatgactgtaagactcacattaaagtagttagtaaattagttcatattctttaccgatctgccaaaattagcttattgtcataggagttaggaaaacttagcaaaaataagattttaaagtcctaaatacatggaactgatactagattcagaagatgccaatttagagaatgcatttttctcatctttgtggcctccataggttattctcagagcactgtttatagaaggtctgtaataaaagtttataattaccaatgactaattgtatgtcaggcactttttcatatatgatattgtcaaatactaaaaccagaaaagttcatctttttcaggatatcacaataaggagagtgccccagatccgaagatcagagtatcactgcagagtggtgttgcattagacttttatagataggagtcaacaagttacaagtgagaggatctacagtagggattttgcaatcaggggaagcctcaatcagctagatgaacaggaaaagtttatctctgtgtctagctagtttctgggggaaaagcaatcataatcttagctaatcactcaagagacaaagaacaggaagttgactaggggcaaaatgagaagggtctgtggctagccttgtcatcaggtttaggcaaaaggagaaaggcctgtgactctgtcaatatttaaaccacagagttactctgaaatatattaacaccaaaagtcagaaattgacattcagagaggttgagaaacttgctaaggtcacatagctagtaaatgacagaatttcatcctatatctttctggctttctctttttatcatgccacattactcacattgtgttggatgaatgcttaaacagtaatttttatggttaatgtgacttttatttattttctatgtatttatacacatactacctagtttggaaataatggtcttcagagaactaggtgtaaatgtttagaaatgacaggtatctgttcacaagctggtttatagtaagaacatgcctcgttccccataagaaaatctaccttttcagtgactgcatagggagaaatataggattctagtgtgttaatatttagagtgattacttttgctataaatcaataagctgtagtgatagaaagtatcactgtttctttttcagctctgctgtgtggaaccctagaggttttgcaggaggtgctttgagatcctcacataagtttttggctggatgggggagcaggacaggaatccgtcagggcttggttccccagcttcagcctaagctattgggtatacatgttgaattcgaaagttaaaaaagactcagtaaagaaggtaataaaaatgtgaaaactattaatctgagagaatcagttattttaataaaacaaagcctgtatatgtatatttctcttggaagacttaagttcataagtgtattggctattatcagcttcatggagacccttgctgtgttttcagtattcacagcaatgcaatgttttcatgcacctgaagtgttcatcaacacagcagaggaatctaacctgtctggcctgaatcatttggcatctattccatgctcaaatttttgtggtaattatgagtgtgaagtgataatttgttgttgagttttgtcctggggctgagtcatttaattcttttttttaaatcatgttttaaaattttttgttagtaaacagaccaggtgttgtttcatagtaactgcattatattcgctgaacactgaagcaaaaattgaagcaaaacaaaagccactacacttctgtctgtgctaccttcctaaccatagtaactgtgtctattgtaagtagaagagaagaaggagcagtttaagcttaggatctgggggctgctgaagccaagaacttttgaggtaccttgtcactactggcagcagaaacatggaagttttagcttagaggcaagcaaagcgaagtttagtgctttcctgattcctcttgttctcctatttagggataacctggctgcccctactccatgcatcacatgccaagaagttcaggcagtgacaggagatgctatcattagctttgattctctccataacctcctggttttagataggagtgctatggttacaggaagatggcaaaatgaaaaataagacaaatcaaccagaagataccagaaaataggagaaaatgagataaggaactatgaactggaaagcaaaacaagtgaattatttgtagcagtcaaagtttctagacattttggaggaaattgaatcttaggaaactgttctgaaaggagttatgaatatgaataaacaggaaagagtgacatttaaggctgggggactgcaagtgcaaaagcttatagtggaaatgaaccatagatattgaccatgaaaaggtatgtagggctgagaaataagtaggcaagaatacagaggttggcaatagtagagctcagttttagactttgctactaaaattataatcattagtaaactgataatctctctaaggtaacagataaaatgtttttttattcttccttgataaggcttgggaatttaatgagtataagagtgatcattttcttggtccctgaaacagggaggaaaaattagtattattaatgctaaagtaggagccttctaatcacatgtttcttttgttccctctttctcaggctacaattggcagacatgagtaataataatcaggaagaagaagagagagtgagcacgggagaaacgtgtgattagaaggctcctagcatagctaatgctaactttcctccctatttagggggatcaagttctcaagattcttatgggtacattctttaagagtagttctctctagaagggttgaaaattacctccttggtataatggccaatatttggatgatgggtatactagaagcccaacccccaccagtatgcaggtaatactcatgtaacaaacaagcacatgtaccccctgaatctacattttttaaagaatagttctcaaattgatgtccctgaactagcagcatcagtaccacatgaggacttgtaagaaaggccagttttcaggcctcctcctaggcgtacagaagcataaactctgaagtggaacccaccagtctgtgttttaataagccttccaggtgattctcatgcacactaaaatcgaaaaacactgccttaaagctttttttcaatataaaagtactccagaaaatagaaagttgatgcatttttcttccaagctccttttctcaatgctttacaattttctgattaaatctaggagaaataaaaagaacccaatcaggtggtactaggctttcaacacacactattcttcctttgaaaaagaaaggcgtagctgtgctccagacctaaaaacagcaactgcaagagcacccagctggggtgcatcaggtgcagcatcagtccctgccttggatttacaaacccagaaagaatattttttaaatcaattattaaccggagactcagaagtcttctatttgacagagcttcagaaactgaatcattaattatatccaagacaaacatatagctgttgatgctgaacttttaagagaatttagcagctgtttattaaatgccaagagaaaattggtagttgcaactttggggatcaaataaaaatggcaaaggtaacagacaccacactaaaagggggacaagtggaaatatgaaggctgtagtcactaaatgtaaggagaactgagatgcagctttttgtaaagaggagggagagtggagtgagagtcacagcaagaaataagaggcagatgaggggagcgggagtctaattacaataaaaactgattgattgggccaggtgcggtggctcacgcctataatcccagcattttgggaggctaaggcaggaggatttcttgggcccagaggttcaagatgagcctgggcaacatagcgagaccctgtcttcccagaaaataaaaaaaattagccgggcctggcagcatgcaactgtggtaccagctactcaggaggctgaggtgagaagattgtttgatcccaggagttaaaggctgcagggagctatgatcgcaccactgcactccagcctgggtgacacagtgggacactgtctgaaaaaaacaaacctaattgattcattgattaatatgtcttttagagaaagccccatctctactaaaaatacaaaaaattagcccggcgtggtgacatacacctgtagtctcagctactcaggaggctgaggcgagagaatcgtttgtacctgggaggtggaggttgcagtgagccaagattgtgccactgcactccagcctgggtgacagagcaagactctgtctcaaaaagagaaggagagtaagactagctataaaacatactgtcataaaaaaccataaaatgtagatatccttgtattactagtaactaacattttgagttctcattgtgtgccaagcattgtactaagtactctcatttgattcccacaatagccctatgaaacaaacactattattactatctctgcttaagagatgaggaaactgaggttcttagaagggaagttacacagctaatatgtaagcctctaggatttgaaccagacaatcctactccaggatctgagttcttcacatataaactcctcaatttatcagatctccaagatgattaaatactattctatatgctatcgtccttttaaaataattgtcttattattgttttctgattataaaatgaatatgcgatcattgcatctaactcagaaaattcaaaaatgtttataaaataaagatcattcttggtcccatcacccagagattactgatggtaactaacatgtgctgtactttatttttatacttggtgcctcagaaccatctaaggtgccctttagcaggaaatcagctccagcccagacagtctgattccctaggtctgggtaaggtcaaggcttgtgtattttcaataagtacctcttctacagagccatagttcaagcccagtgctaaaaacactgttctataacttacaagcccggttctaaaaacactgttctataacagattttcaaaaatttctgtgcagaatatcctgtatttagtttatctctagattctagagcaccttgatttttcccattaaagctattttattttagaaccaggaaaatacctaatacagaagtagttttcaaacattagtctgcatcaggattacttagaggacttgttaaaacatggactacagagtttctgatttgttaggtctgggatggagcccaataacatgcatttttaacaagttctgggatattgcttctcctgctggtacaaggaccacactttaagaaacactatataatagagaatacttccaaataagagttcctggtagaaactcttcttatcgtctttggaaatcccttaagattcaagtacaagatcctgaccttgatgccatcatttagaaacaaatttagtgacatatactagcatgattaatatcatcccttcctcaggaactccatatgtgaaaactattcagctgcttccatgtctctatgacagcagtaaaagtgtaacaagaaaaggatagctgctgacgttgtcagctaaaaaatcttaaatgtccagatgattgttggtagtgatggaagggacaggaggacaaggtcagttgcacccaatagcaggcataacacctatcacagaagtctaatatgtgacatttcttaagtaggacaaataccagaggaggatgttgatgctactggcagtttttatgaattatacatgatgcactattttaaaattcagcagaaaactgccatttaccctctataataaaaggtattgtatgaaaaatgaagtgctgggtgtgtaaatatgagatgctactgatataatggatcttaagcatacttcacacttctctttgctctctagcccctgacggaagaccaagcttttaagagtagggttgacctttggaaatccagcagaagcattcatgaactagatacctcagtactgtcaatctgtgctttcataccagcaaccaaattctaaatgtaactctaccattttattggcttttggctttacctccttgatactggagtaatacaagtgtatagctatatttggcatttgacatttacttgtcaatcagcagaaaaacagaaaacccctttcagacaatataatttaccctagaagtttaaatgttaaaattagaaatgttcattatgactacaaactgctaaaagtcatctaggaaaattcattcatttatgattcagtcaacaagtatctatagagcacttccaacattccaagcattgttgtagattcaggggatagaacagtgagaaaaaaaatacagaagtggagcaaggtggccgactagaagccctcgtcagttgctctccccacaggaacaccaaattgaacaactattcacacaaaaaacaccttcataaaagcaaaaaatccggggagtgatcacagctcctgattttaacttcatatcactgaaagaggcactgaagagggtaggaaagataatcttgagtagccagcaccacccttcctccatcccttggcagcagccgtgtgtcacagaaagagaatctgtgcatttgcgggagggagaccatagtgatataggactttgcattggaactcagtgctgccctgtcacaacagaaaacaacaccaggcagaactcagctggcgcccaaggagggagcgtttagaccagccctagccagagggcaatcatacatctcagcagtcagaagctgagttctggcaagccttgccaccacagaataaagtgttctggggttctaaataaacttaaaaggcagtctaggtcaccaagaatgcaattcttgggcaagtcctggtgctagtgaggaatgagctgggttggccaaggaagtgcttgcactacccctcccccaatcacagacagtgcagtttgcagttttggagagactcctttcctccacttgagagaagaaggaagagtaaagaggactttcttttgcaacttggacaccaactccaccatagtaggatagggcaccaagcagagtcctaaggccccattctagtccttagcttctggatgacatttctagacacaccctggttcagaaggggaacctactgccttgaaggaaaggacccagacctgtcaggatgcatcacctgctgactaaagagcccttgggccctgaataatcagcagtgacccaggtagtacttgccgtgggccttgggtgagactcagagatgggccttgggtgagactcaaagatgtgctggcttcaggtgtgatccattacattcccagctgtggtcgctatggagagacactcctgcttgagaaaaggagagggaagagtaaaggagactttgtcttggagcttaggtaccagctcggccacagttggtagaacaccaagagggctcttgggtcctcagttccagggtttggctctggaaaagcatttctggaccttccctgggccataggggagcccattgcccagaagggagaatcccaggcttggccgcattcaccatgagatcactgaagagctcttaagatttgagtgaacattggcagtagccagccgatacttgttgtggatataggacagtgatggctacagggagagactcttctgcttatgcgaagggaaaggaagaatgggaaagatttttttcttgtggcttggctttcagctcagcctcatagcatagaacaccaagtagattcctaaggtttctgactcagatcctggctcctggatggcatctctagacgttcccagggctgcagagaactcactactttgaagggaaggacataagcctggctggctttgccgccagcccacctggggctgattttagagccccagggcattgagcaaacataggtgatagccaggcagtggttactgcaggccttctgcaagacccagcaccatgctggcttcaggtctgacacagcgcagtcccagtggtggtgcttgtgtcacccatcccccagctccagataactcagcacagagagggagagactccattagtttgtgagaaagtaagggaagagaacaagagtatctgcctgataatccagagaattcttttacatcttatccaagaccaccaagacagtgcccctacaagtctgcaagagctacagcattactgggcttggagtgccccttaattcagacaggctgcagagaccaaaaacttagattacaacagccaagttcttcaaatacttggaaagcctctccaagaaggatgcatacaaacaaactcagactgtgaagactgcaataaatacttagctcttaaataccagacactggcaaacatccacacgcattaaggccatccaggaaaacatgacctcaccaaacaaactaaataaggcatcaaggaccaatcctggagagatagagatatatgacctttcagacagagaactaaaaatagcagttttgaagaaactcaatgaaatttaagataacactgaaaaggaattcagaatcctaggaggtaaatttaacaaataaattaaaatgattaagaatcagaaattctggaattaaaaaatgcaattgaaatactgcagtatttatcagaatctctcaccagactaaacaaaagaacaagaagaggagaagaagtaggaggtggaagaggagatgggggagaataagaagggagagaaagggaaggaggaagagacccaaataaataaaattagaggtggaaaaggagacattacaatcgataccacaaaaactcaagggatcattagaggctactatcagcaactatatgctgataaattggaaagcctagaataaatcaataaattcctagacacatacaacctaccaagattgaaccatgaggaaattcaaaacctgaacagaccaataacaagtaatgagatcaaagccataataaagtctcccagcaaaggaaagcctgagacaactgatgaattttactaaacatttaaagaactaataccaatcctattcaaactattcaaaacaaataggaggaggaaatacttccaaactcattccacgaggccagtattaccctgatacaaaaaccagtcaaagacacatcagtaacagagaactatcggccaatattcctgataaacgtggatgcagaaaacctcaacaaaatgttagcaaactgaattcaatgacaatgataaaaattatccatgatgaccaagtggggtttatcccagggattcaaggatggtttaacatacgcaaatcaatcaatgtgatatatcaagagaatgaatgacaaaaaccataaaccatatgatcatgtcaactgatgctgaaaaagcatgtgataacattcaacatctcttcgtgatagaaaccttcaaaaaactggatatgaaaagagtatacttcaacacaataaaagccatatatgacagacccacagctagtatcaaaatgaatggggaaaaactgaaatccttttctctaaaatatggaacatgaaaaggatgcttactttcaccactgttattcaacatagtactggaagtcctagacagagcaatcagacaagagaataaaagaaagggcgtctaaattggaaaggaagaagtcaaattatccttgtttacagatgatataatcttatacttggaaaatcctaaagagtccaccaaaaaactagtacaactgataaacaaattcaataaagttgcaggatacaaaatcaacatacaaaaattagtagcacttctatatgccaaaagagatcaatctaaaaatgaaatcaagaaaataatcttatttacaatggctacaaattaaatacctaggaattaaccaaggaagtgaaagatctctacaatgaaaactatacaacattgaagagtagacacacaaatacacacacagggaaagatatttcatgttcatggattggaataatcatattgttaagatgtccatactacccaaagcaatctacagagtcaatgcaatccccagcaaaatatcaatgatattcttcacagaaatagaaaaactatcctaaaatttacatgaaatcacaaaagacccagattagccaatgatatcctgagcaacagaagcaaaactagagaaatcacagtatctaacttcaaattatattacagatctatagtaaccaaaacaacaagatactggcataaaaatagacacatagaccaatggaacagaatagagatcctagaaacaaatccattaagtctgtagggaactcattttgacaaaaatgcaaagaacagagattggggaaagaataatctcttcaataaattgtgctgagaaaattgaatatacatatgcagaagaatgaaactagacccctatctcttgccatatacaaaaataaaatcaaaatgaattaaagactacgaccttaacctatgaaactagtaaaataaaacataggggaaactatccaagacaatggattaggcaaagatttcttgagtaatagccaacaagcacaggcaaccaaagcaaaaatgaacaaatgagatcataccaagttaaaaagcttctgtacagcaaagcaaacaatcaacaaggtgaggagattacccacaaaatggaagaaaatatttgcgaagtatccatctgacatgggattaataaccagaatatatatggaactcaagcaattctatagaaaaattctgattaaaaatgggcaaaagatctgaatagacatttctcaaaggaagacatacaaatggcacacaagtatatgaaatggtgctcaacatcattgatcatcagagaactgcaaatcaaaactgcaatgaaatatctccagtaaaaatggcttttattcaaaagacaggcaagaacaaatgctggcaaggatatggagagaagcgactctttgtacactgttggtgggaatgcacattagtacagctactatggaggatagtttgtagatttctcaaaaaactaaaaatagagctaccatgtgattcaacaatcccactgctaggtatataaccaaaagaaaggaaatcagtctatggaggagtttcctgtgctcccatgtttattgcaccactgttcacaatagccaagatttggaaccaacctaagtgtccattgacagattaatggataagaaaatgtggtacatatacacaatgcacaatggagtactaatcagtcatagaaaagaatgagatcctgtcatctgcaacaacatggatggagctggaggacattaagtgaaataagccaggcacagaaaagcaaacgtcacatgttctcacatatctgtgggagctaaaaattaacacaattgaactcatggagacagagagtagaatgatgagtggtcaccagaggctgggaagggtagtagggttggggaggggaagtggggatggttaatgggtacaaaaatgtagttagatagaatgaatacaatctagtatttgatagcacaaccgaatgattacagtttacaataatatcatactcttataaagagtataataagatatttgtaacacaaagaaagaataaatgctcaaggtgatggatatcccatttaccttaatattattattaggcattatatttctatatcaaaatatctcatgtaccccataaatatatacacctactttgtactcataaaaattttttttaaagaaaataaagccaggtcatttgaaattaaatacacacacacacacacacacacacacacacacacacacacacacacacacacagtcttggcccttcaggaacttacattgtaatggtgatgaggtctgtcttattctcatctttgagaactttgctatgtaaaaaaccaacagtgagtcatcacttaggggcttgttaaaatgcagagtctcaggtccatttccagatgtcctgaaacagaatctgtatgttattttatgatatccccgagtgatttgcatccacattaaaatctgagaatcgctgttctagaaaagagcctgaggtaaagattaaaattctgattttatttagaagcacaagcccaggagagtaaaaataggggaaaagataaatgaagaaaaggaagctgtaaaacgatgaaatattgtgctggctatgacttcaaaatgagtctggaaggggcacagcaggtcactcagcaggtgggtttgttctgcatgtgaaacttctccttctgcacacagttggcaaggaagatttccaccaaactctttctcctgaatcctgctttctacagattgaagttcacaccactgcatggtttctgcaccccttctattctggattactaagtccagctctgaaagtggaacagcaggtgcagaccaagaaaaagaaaaagaagggagcagttaagagtttctgagaagggcctgcacagtggcttatgcctgtaatcccagcattttgggaggctgaggtgggtggatcagctgaggtcaggagttcaagaccagcctggccaatgtggtgaaaccccatccctactaaaaatatgaaaattagctgggcatggtggtgcacgcctgtaatcccagctactcggagactgaggcaggagaatcgctcaaacccaggaggcagagattacagtgagccaggattgcgccattgcactccagcctgggcaacaagagtaaaactcccatctcaaaaaaaaaaaaaaaaaaaaaagagtttctgagaagacaaagtttgtgtctcaaaatagtgtacatgggaaattccatccagataagtttgtataagtaaatcgaagtaatatttatttgtctgtcagcagaaacacagaaaaccctctctgccagacaaggtaattcaccataaaattgtgaatgttatattagaaattattatcatgactaggagttactggtctttcttgacattcatgagtactccctgactccctgactatgacctcctgttcctttgagaccactcaggatttccgcataaccattattagctcctcctctatctccaggtttctagttttattagcccattttcacactgctataaagaactacctgagactgggtaatttataaagaaaagaggtttaattgactcacagttccacatggctggggaggcctcaggaaacttacaatcatggcagcagaaggtgaaggggaagcaaggcacatcttacatgctggcaggagagacagtgagggaggaggtgccacagttttaaaccatcagatctcatgagaactctctcactatcatgagaacagcatggggaaaatccacccccatgatccaatcacttcccaccaggtccctcccctaacacatggggattacaattcaagataggatttgggtggggacacagagccaaaccatatcactcaccctgcttccccacatttattgatacatgtggtgcatttgtgaatctcgaatactcaggcccattcttattcatcccatgtcctgatccaaaccacaccctgcacacgtctattttgatatcatcatgctgacatcctccctggataagccaaaaatcaggtccagacgtaaccaaataatctggatcgataaatccagataagcaaatgggaggaggtatcaaaggagaagccacagatcccagagtggggcaagtccaagacccaggagatacatagcacacactccccaaggtgtgtgccctcccagagtactcccactatgagaaattctcatccagaccatccagatttgacttggtctgtaatctatgaaaattacaaaaatgtaaccaatacctaaatgtcatgaatagttatccctagcaatgagaatatagattttctctttcatttttatcatttcctctgcttttcaaaatttcggtgataaagctgtactgcttttataatgaggaactcttccattatttttatgaaataatatattttggcaaggagactctcttaaaaacagaataaggaaaaaccagaatgacatgtagctattaaattttaaattatgtgcatgttcatagatagtaaatctccccaaactttagagtttaggaaactctaaatttccacagcacccacaacctaaaggaaaaaatattttccttagaccaaaaggggataaatatgtgaagagtcagaaagcagaaattgtgctttctgaaggcaatactgtactgccaaatgtctaatgaggcatttcaagaaagtctgtaacttccttgtacttgtgaaacacaggcagtctactgtccagccctaaagtaatgagaagggcctttagaaatgtcggcacgtgatgttggtcagctctaaactctagacaccttttaaagaagtgcttagtgtcctttccaaattctacttcaaattccagtcttaacctacatactgcacaactagcagaaccatgttttctgctagttgatcattttatcaactctgatcagatgtcagagttaattttgtgtaaatgttaacagatatggttagtttattcctacaaattttttgactgccagctactacttctacttcctatgctattacaaaaatataataatttgtactcagatttatgagataatggatccttatcttccaaacatagtttctaaaacagttcagaattcactggtgctgaaaagcccttctcagctagatattaatgttcaccttaaatttcttacgtctcaggttactatctctgtgaaaaggaaggaaagttggctttctcattgtgtctactgccttgatttgggaccctagaggtttccagcctctaatcctgttaatctttgatagtgaaagctggttaattcacttgagataccatacttaaggacatgaattagtaatgggcatttgacctctctgtaattattatgctcacatgataatttatgaaaataaatgcgtcttaagagataatgatttctgacaattcacttttcatattgaatcaaatcacgcagtaaatatagctattcagagcctgccactgcatacatattatagccattgggacctgctgctattctatttgttaaacagtgaactatggaattcattttgatgactcaatgtgaatgagtttttagatcccaccttcctaactgactatgcataaatacactccaaactcatgtcttggcctctcatttaaaaaaatacttattaacaattgatgattctaatacaattttcagtttttttcacatttagaaagtgacacttcaagtttgtagatatttcaggctagtttataaaccagagcatatgacagaaatgaaatagcacaggaagcagtgtgtcttgatatcctattttaatcagaaagtaaatcttactgaaaaaaaaatcatgtttctagtgaatctaagagaagtaggtaaagtggcatgtggtaaaattaaaatacttctataaaaaatctgttattaacatttaacatgtcaaaatacattgctgtgcattttgaaaaatcatattgtgtgttttaaacatgtctctctcaggcatccaaaatccttgagataggggagacagacgttattatattaaagatataggatatactttcaataaataaggagccagaaacaaacaacatcatatgagtacttcttaaaatttgcaatgtgggaaacaaattacttgtcagttatgtaccttgcttgaaaagaaaacacttattactctcttgtgctactgaaaataaaatgttcttggattcagttaaaaggtatttgtaggcacagtgacatttcacaattgtaaatgttatagcactctgtggaaatatagttggagacattccctccagaaaccactttgacaaggatagtatttataagtagacaagaaagtttgctcaaaaacagccttgccattttactttgcaacaaattaatatctatataagtcttgtaatacagtttataaatatttataatatataaaaatatttacttaggaaaaacctctctggatagcaagacctacttgtagattatttgcattttaatttgtgtgatgaacaggattcaaaaaagattaccaacataaatatttttaaattgcagaaatgattgttgggagttctgggttccaactagttatcttttggcagttaattccaagttctagataataggacattcttttattgggccagaattatttttgtatttttttttcagttattccccttcttaaaattgctcctttttcctagccatcattagccccgtcttaggaatccacttaaaaatttttatgtcttaaatttttaatagttctatactttaaagttttttatttttgttttgctttttccagtcagcttttaaatttattgagagcagagtctctgcaaccttgctttgatttctcccaccaggtcaggtgctgtgccaatccttagagaaggcttttgataaaagtgttcagaatggacttggctttaaaactggtcacaaattaccacaaaagcactttctgaatggatacttggatttcatttccaataaattatctgcagtagaagaaatattggtgaagaatgtagcattattttttaaaataagctcattaaaatagtctgatcctatttgtaccttttattagtagattcttctgtgtattgaataaatgtctgtgaaaatcctaatatatcacactatagttattttttctttcttgtagaatctactacaaagaggcatttaattttatttgatgcattcctgtttactctcccataaatatagaattattgtagttcatttggagagcgagtatatggaggaattactggcctaagataaagtactgaatctagtcctattttcatcagtgactaaccctgtgagatttttcaagtaactactgtcaatctgtttttatcatgggtcaactggagacactattttctttaccttcctcagagaattgttgctacaatcacatgatataatataggagctagcactctgaatactataaagaaccatacgaatctacactgtgattatgccagtctccaccatgatacactgaaagctataaaacaaaattgttgtttaaagatcctgggtcattgtcttggttttgggatggaaaagaatttcttttgaaaaatgagattctgaaaccctattttaaaagaccaaagctttaccaatgtttatatactgaaccagaccctactgcaaccaaactaatctgggctgccttggaagatcgctaacatatattgagtgtgtgcactctgctaagccctgtgtggctttaaatgagagacacgctatctctcaatcaatgcagccctataaagatgggtaatactgttatccttacttcataggtgaggaaattgtggcttagatagactgatgtgtctggggcccccagatcaaaaaacgcagagccaaacttgaatccacatttgtcctacttcagcaccaatgtgttcctcctcttttctgtcctggcaatactgttacctaaggcccagtcaattttagagaaatccaaatcgatgaggaagaaaattaaatagtaagaatcacattgtttaatttcaaattggtttgaaaatacttgtggaattatattgatctttagaggtatttaaggaaaattttaacatctttacacagaaaaagcttttaaaatactaatcaacagtgaaaaataaataccaaaaagcactcctttaatgagttattgcttaagacatacctgtggcaatgcatgtacctttcaagtatgtaatgtttgttcccgtgtcaagagtttgttctctaatgtaacatttgaattatcataacttctattaaaaaataaaattactccattggaaaatcattctggtttcccagactctcatttgttgccaatatatatgatgttttctcttgaaaacttacgtggtatttaccactgtagaaggcaaaaatgtctgagtcatttagtcatttacatgagctaatagaaaaacaaacccttgcgtagtttaaaaaatgtaattccaattagcagtcttaggtgatttatgctaagtagaatgttcataattattttaacttaaaaaaaaaagaagctgggtgcgatggctcacacctgtaatcccagcactttgggaggaggccaaggcaggtggatcacctgaggtcaggagtttgagaccagcctggccaacatggtgaaaccctgtctctactaaaaatacaaaaattagccaggcgtggtggcacatgcctgtaatcctagctactcaggaggctgagcacgagaatcgcttgaacccagggcgacagagcctttgtctcaagaaagaaagcatacatgttgtgttttagttaatgagactgaacctataattgtatggtgtctttaaaataagctcatacaaatagtctaattctaattgcaccttttcttagtggacagttctgagtattgcataaatatctttgaaaattttgatatactatgtttatatttttctttcttgtagaatatactacaaagagacatttaattttatttgatgccatagactttatatacatttcccatcaatgtgatgagaattgtaggttagttactaagcagtaaaaacagaatcattttaattctgcccctaaaatctttttcttgttgactctgagagcttgtcatagtgaaaagcatagcagatcatagctttaacaggagaaattcagatagtcctcatggcatatttggggcaaaaggtgtttaaaagctgaaactttttctttgatcattacattttagtgtaataatattgctggctctcttgattctttaagggaccttatagttattgacctcaaagaatatttgtaatgagtacattgcaattaatacaaaatttcaagtaactcatatatataaatgtaaatatatacattgctaaaatagtgtcccaaattcaagtggtaactgtaatttgaaagtgaaggattcttcaagtcactggggcacaaggcaagattagtttttatatcaggttctattttatacacaatgccagagctatgaaaaagtagaactagcaacataaaactgcaaactattatcatacttagatttagaaactttatagtgtagttgctattatgttaaaagtcagaaaaaaatgtttactctatagctgttacccagtctcataaggcataaaaatgataatcctatattataaccaagaattttatacataaaatgaatatttcattattgctttgagatattttcagaatttgcttagtgaacttcaaaatctcattcttgcttcacccagcccaaaacgcttactcctcttccctcagcataaagctatcaaataagctggctgcatccccaaacctaaatgcagcttttagatgttgctttagaaatatacccagggtctctaatgtatatatttcaaaggtttgtaagaatatgcatttttgtcttttatatacaagaaaatgatgctgactgggatacccaactgggttatatgcattcattcatccaagaatgaaatggcctatgtgtttataatgtcaccttcactttgtcctcttttctatccacatatatttataaaacttttgagaaactcatctgtactacaccatttccttcagtgagagtctaaatgctgctattatgtaagaaagtcagagttggaaatgtttttttctaaatgtaatgtgggtctttctactagagtaatataattctgggaactttctttaggcactctgtaatggaggaagaaaagtaaataacacggggttggttcttgtcttcaaggagctcacaatgaagtagttaagactgacaaatggaatcatacaaaataataattgcaagactattactttagctctgttaagcaacttaaatggcaatgcccctgtaggaccaaaaataaaatattacattaattattctttcagtatgaaggagtctccctgtgcagagatttgagagataaattatttgacccagaagatatagaaatggataccttggcttacatattcagagaaatattttctcatttggagtagctaccttaggaagctatgcaactctcctttgactagaatattattagatttccttgttgacttgcctgcagaagtaattcactttattgtcaaacttgtcagcatccaacttacatttgtagtttttttagtcacgatgctaaacctccttctttaattgcatatcaaaatgatattttaaagaaatgtcaattgtttttaagtgatgtctttagttctcaacatgctggcgtttctttattgagcccattgttgcaattcagattatatctgtcattatataacccttatgtttgcagacattttctaagcaatgatggttggccttaggctaagccagaccattaaatctgttctgggctggaagattggcacaattgaagaatcagacatcatttagagttgtttccatttaggtttactaatgaaccaataaacaaatgagagatcacaatacaggttagtggatgcagttcatgattacttctttcttccacatagtcataatggcatattcaaaatggttaacgcaatccatgtaccatgaagcatccacctggacagagcagcccagagccagcagctttgcctcgtagcccaataggatgggggaagggtgtttacgcctcaccatagaagaaatttcttcctgaatcactgatatatacttccatattctattttttactaagtcatcaaacctggctaccatcagtcttcagaatgttatttgaattttcaagagactgcttggttctcttatttctcttctacacaatcacttgtttgatctagttagtactggtatccttgttggtgttttaaggaatgcccaggatctgcttttgtctttcagcatgtttattgggtacctacttaaggaaaaacactgtatcgacatggaaggccatgacatttaaataacttaatggagatattttaacagacagaaagctggagagaaaacagttccacataaaactataaaaacattcttatttttaagttattttaatgaaatattaattaaggaagattaaagcatttccctaagttttctcccattaattctgttgtgactgatacattttggcaattagttgaaactaaacatttgtttatcaaaaattatcactttgtttccattgctttttactgttttaaatacttcccatctacacaaacttgacattaagtcacaaaagtggcaagttgtatagaactgtgattttcggaatcagaagatctgggtctgatattctgatcatgaaactcaaagggcatagttctgagcaagtcccttagtcttcttggacctctgtttctaaatccagaaactttggtgtatctaagcatagaaaaggtacagcaaaaaagcagtattatataatcttaagggaccattgtatatgcaatctatcattgacagaatcattacgcgactcatgactgtatagattaaatcatgattcctcacatattttagaattcttcacaataaatgtctttaattagggatcattctcttctttttactgtaaacatctaaagcacttaatataaaaatctgttgcttatagcaaggtgtcccactaatttattaaaagaatcaatataacaaatcctttttgtttccaaaataaaatttctgaaccataagaattagtaaattctttttagaaagttgaacaataaagttaaggctaatatttttatgtaccaaacatccaggtataagatgtcacaatttcaaaagttcttgtgcaggcaaaaccttagtttcatggaatttattatggcatttattacaactttatgggattttcagaatccaaattctaatatatgattcatgcttttggtgtatcgtgcatattttcaccaccacctcatacatagaggttttattttttaataaatacatatcagaatattacaggttttatatatataataaatggacttcatatttgacatattcaaatatatcacgatttactcatcaaaaaaagtctgtaacatgctttgaacacttaagactaaagcacgttagaaccatgccatgatgaggaggatatagaacaaggaaacatctgtagtgagctgcataatgtaacaacaattaaccttaatcacagaaaagcccagtccataccccattcaagatagtatttctcatcacggtggagcaggatgcagactagaaaacacatgaactagagcgccacaaacaaacacggcaggggaggcagttgagtcgtctcaggaatattaagaaaacaagctcattttaatgggttttagtttgggctgtatttttaaaatatctttctgaaagcatgtcacaatttactaatattattttttagttttcaaaactttgtattcattgagtatgtcttcatcctaaagaatctaatataaaaaaaagcactttactaaccacaaactagtttgtaacagggtatactgtaattaccatggcaattatattagacatctttttttattcttgctaacttggaattatttcaagattttctctttggactgacattttcaaatcttgagctctagtgaagatgatttttacttcttcacattgtgaaagttgaattaatcttttcagagagtttttcatatggttaatttttggtattgggacacttcaacttagaatttgaacttcaaaccaagaaaaaaagacttatggggcaataatattatttatctttctttttctgactgtaagacatgaacataatatatatttcatatcaacctcataaaacattccaatgttcccaggccacattaaaatgcaaaataagatggtattatataacttgtatcaataggacccatgaataattggcacaaagatatctgtgcgtatgtcgtgtgaaaagctcagatggagtgactacaagaaaggtggatggaaggaacatgaaagactaatgaaatcataatttcaagagtaaagctactgactgtgaaggatacagattaactttgtatatgcagtcattgacatattaagttatgcctgtatccaaacttaggtgtcaacatagtacattttatatgtaaaaaacagtcaaagtaatatatacatcctagactttggctaccactaaactgtattaaagtgttgctgtaccttttaagacaaaatgatgcagtaaactcaccataaaaatataaaacccagatttgtggctgttaaaaatataaccaccaagggaagtagaacttttctgaagatataaattaggtacctgaagtggcgtgctgccataacaagtagctaaaaatgtaagaaatcagaaagtggatagaggctggaacaatttagaggagcatgatagaaaaatccttgattgctttgaacagacttagtagaaatatggacattaaagactctgctggtaggggctcagtaagatatgggaaacaaattattgggaactgaaagaatggagatagatccttgttacatagtggcaaaaaggcttagtggaattgtctccttcagttatgtggaaaagagaacctgtgaaagatgagcaaggatatctagctaaggaaattttcaagcaaagtgttgaaaatgtggcctgctcagagttttactcttttactaccattttactcttgctgcttagagtaaaatgtcagagagataaattggggtaaactattaaacaaaaagaaactcagtcttgacaatttgagatattatcagtctattcagatgacaaaagatggtaaaagtaagagattgcttctgaaagtgtggcataggaaaaagaaaagccaagggtgtggttgtacaactctttgctgaaactttgaaagatcaaaagattagtgtttggccctaagacactaaagttgtgcctaatagataccaacttagagggcttcagtaaaccttaagaatgttgccctcagccatctcaacagaagccaacgatagaggaagtctcaaaaagatttgtagatgtggcctcagtctgatagagaacatctctgtgtcatccacaagagattcactaagtttttgagaaaattatatcagcagaaaactgccagcttggactgaaaggaacagggagactacaaagtgaaaaaaaggctgttagataccaaaattccacttgcagaaagcaggctgataaaactacttagtttcaaactactgttcaaaaaagatgaatgactcagcaagcagaaccagtagtccaggggaaagaattgagagcctgtaagtaagagtctatcctgttcaacgcctgtgacatcctaagcagagaatccagtcacacccactcagacttctaacctacagaactatgaggtaataaatgggtattgttccaagccactgattttttcttgagtaatttgttatgcagcaatagaaacctattagagatattaaaagtccatccactaaagattttgaagaatttagtagagaaaatagtagttccttgaaatttttatatatacccactcctaaattgtttacaaaatgcttgctctgaaaacaatttttttaaaatgctgtattctgtagatagtttctatgaagttataaatgcacatattcctggattcaggaactcaccagttattttctttttcttttttttttagacagggtctcactctgttgctcaggctggagtgcggagcgcaatggtgcgataacgtgcctaatgtgcttgtggttccagctacttgggggtgggttgcacttaggtatgcagatcgctggagcccaggaggtcaagattgtagtgagctgtgatcatactacttcactccagcctgggcaacagagtgagaccctgtctctggaagaaaaaaaaaaaaagaatatctgggatggctgaaaaacaacctttagcttgagtttctagatatgacttctaaagccctatcagagaactgggctgctcaaagagctgcagctgctgccaccattaggaagcatcaccaccctgcacctctgccacagcccacagcattacagccagatcttaggcccatgtgacctattttagcattcctgaatgatggaacccaaaccatccatgggagaacatataggaaatgtagtttttaagctttacaggaagaaacattagaagaaagttggcatagttgttgaataatccataagtatctcccacagggacataatgatttaaattaaaaaggccttagaaagccatttcattgaggaaggcaaaatttttcattttggaagtagtaataaaaagatcagataccctatggatgatttttttcctttgaatcttcctagtttcagatcttcattaattcttttaagtgatagttttcatttttttcactataaatttcctattgggtgattaatagtaaagtaagtaaagataaaagattatttttattggcatttatcttatgcctacataaaatttgctttatcatattatcacaggtctacaaagtttttttctagtcgtttctaacttaagttcactagctgcacatgggcatatgtgcctgtacccagctactcagaatgctgaggtggagggattgcttaagtccaggaggttgagcctgcagtaaaccatgattaggccactgcactgagctggggtgaaagaatgagaccttgtctaaaaaaaacaaaacagaaaaaaaaaaaaagagtttacctatatcaactgagacaatggcttggtatcatggtttgaataagatattgttgtcctgagaggagagtcctacttacttacaagcatgttttggcactgagcctcctctttatctgaactggcttcaaaaatactagtgtcaaaaataacatcagcatataatgggcttacagcagtgatggtagttttagtaactgagtcaaccttaggccaagtgccatttgctggctcaagtcatatgttagggtattattttctgtgacttacaatcagaacattggggcttagatataggtagtcacaaagaagagtagaaatcagtagtggtgaacagtctcttccctgctgtaacatacgcaaaaaagtaggtatattataaagtgtatgatgatgagttgaccatgactaaattagcatactgccatttgagagcactggaccattttcagtagctttgagtactgttcattaatgaaacttgatggaattaaccacttcttattctaatgtttatttagatgtatttgtgtgactgccaaattaagttgaagttacaactgctgtataacaataacaaattactaatctaaacgaactactaatctatactactaggctaagagctaaaaggaaagcaaaaacaagctgaaaacaaataattgggggagtgaagtgaatttttttaacttttgccttcccttagtaactgattttgctttccttggtcttctgtttctttttgcctacttttcttttacaaagttgaaagaagtctgcctgatcttccctcccctattccctttctcatcttgacttatatgccctggaaatgaaaattgtaattgggagaaggggactacttcatgtgtacactcttgacaggagaaagattatgaagggggatggctataactaaggtgaccatttagcttgattttcttggggccttcctggcctatgactattaataagcatcccctttcattctctaaactttcctggtttggataataaattacatcgtcaccctagttataacttggatgagttaaaggatggtatagataagcgtaagaactttctctaaaaatgttgacagtagttgacattttggtagaagcaggcttagctagtctcttgttaataaccataaggacagaattgcttttcttgatacttgagtacctgtgtactcttcagaactatgttatcttttgggagtgttttaaagcatttaagtaattgttctacgcatgaaaattgaactactcagcattcttgtacatgtataataaatgagaggatatgttcaatttagtaatttaagaaaaataatcctagtgagaattcttatttgaaattgtatttcagaaatataaatggagatttcatcaaacgtattccttgtggctttttaaaaaataagttgttcaagaataccattgttgctaataatttttggtaaggaaaaactattgaaatggaaaactgaatatttggaatgttcagcaaacagaataacaattaataatgtctttttcagaaactttaatatttttttcatttacaatttctgaatgttattttttgttttatttcagtgtttattatagtttttcaaaaaagtgtttcttccctcaatccaggttttgctatcattcccgttgacagcaagtaatccatttttatcataattgaaggcaatcttaatgtttggggaaaattctattcaatcctggggaagttatttcctttgtcttccctttgaacagtaactttttatggtgggttggatagataaagctcactgcaaaagtttaggttttagaatccccaagtaggttgtaacagaccatattcccatatgaaaattgacattcccttataatgtacttaatataaggtcgtagagacttttgagaatccattggggcctgctctcaataacaaaaaagacacagagaaataaagtatatgaggattagagttgccaaaaaccttccatgagcagtttagacatacggccttcaagtagaactaacatacttccgtttaatttttttaatcttgttaataattaacataatgcaacaaccccatatggaccatgaaacaatagaacataattccaaagcagttttcatattatattcttttctgtaaaaaaaaatagtgtccaaacatcttacggtatacttttcttcagtgttcttcccaattaataagtattagcactttcctagggtagaatttgctgtgagttcctgctgtggtaaagacgacatggagttaatcacagtgtcatgctttcattctcagttttttagtgaggtgtacttattaccaaaggaaagccttctacgaaaatagtacagcccatgttatgattgaattgtgtattttagccatccagctaactgaggctattaaattacagtggtcagtgctatacttatgagttataaaaatggcatttaagttatttaaatgaacagggtttttttttccaaatagactttatatttgcctgcttgaacatccagaggaagagggtgtagagagctcttaactgcaccactgctgagagagcaacgtgttttctggaagacagtgtaaaggggtagaagagcagggaaagagaatctgccagtcttgagatttgtctcagtgtttagaggattcgtagctatttattcttcataaatggagcatgtgcaggtttagtggtgtaacttttgaaaagatattgtttctgcctaatttgtaatcacaagatacctaattatattgctgttaacaacacctcattttcacactatggactatatagggcatgctctgggcctgtttttcactaaggaaaaagaaaatgagctgctacctgaagtcactggggcggaaggatccctggggtccaagtgatcttacagaatggccctggagggaagctcaagattcaacctacagctctgacacttgataaatcacagaaaggttctgcctgagcctcagtttatctattaatgaggacagtccacacattccatcatatccaatttatggggggaaaaaagagagaatctaatgttagctaggcaaagtataaaccaagcagagagagaaagttcagtggctttactctctaccctgaagcctcaccaagtactgaggtcaccatttggactgaacagttttgaggtgcttttaaattagccctgtttagaaaagattaagttaaaatttcatcagcaaagaacagctttctagagatgaacattaaatgacttttaagaaaagtcatttaagaaaagcagtattagccaggccaaccccttcctcccactgggttctgtaatactgcttgggagtcatatacccaaagccctttcattgctctctgtatttccttggtcaataaggtatatattctattcaaagtaagacatgttctaatataaatattcccatttttccttaatctaagaactactggaaagctgaaaaaaaaagttttgaaaccacactatacagataatatagaaagaacagagggaacgtttgtaatcatatgaaaataataggaaatatacaattaaaagaagtttaaaaataacataaaataattttctattattacaaagaaactttctaggggtttgaattgtgtgtgtgtgtgtgtgtgtgtaaatgaatcatgaaccactctgggactaagatactttatctttgtaacaggtagtgaataattagaaaatcccaaacatcccattaaaccttaactttctaggactgttggtactatagtcattataagtaaatgtaggtcagtgtattagttcattttcatactgctataaagatactacctgagactggataattataaaggaaagagttttaattgactcagttccacatggtgggggaagcctcaggaaacttacaatcatggtggaaggcaaggggtgtgtaagggacatcttacatggcagcaggagagagagagggagcgcaaaggaaactgccacttttaagcaatcagatctcctgagaactccctatcatgagaacagcatgggggaaaccacccccatgatccaatcacctcccacaaggtccctcccttgacacacagggattacaattcaagatgagatttgggtgaggatgcagagccaaaccatatcagtcaggtaaaaacatttatctcaaggggaagctgaaataaccgaatgatatttgtgtagcattaaacacgtaaaattctcaggagtgcagaaaaagaatctaaaatggagaaataaagaaataaagccacaaattagtgaatactagtatattctggatggtaaaataatggtaacaacagtcacaggtaaaataggcaaaatggcgcaggtagaagtaccagttgccaggcattgggcttaaaccccatgtatacattgtctcgtttaatcccatgaaacaaattctaacataacccgtctcttacaaatgagagatcagagacacaaagaggttcactcccttgcctaagctgtctgaagttgaggaacattagttcaagtcccagtggtctgactccagggtatgtgccctctcttgttcaatgctgataaccctataagatgagcacaacccactgaggtaaataatggtttccccattacagggaatggcagcagaagatcagagaagttaggtgacttctccagggtcacatacagaccccacacaatagcagagatgttaacccaggcctttttaaacatgtattttctgctatgccatgctaaattttttcccattgtcatttttatcactttggtgacggtttaatgaatacagaattgtatatctgactataattagatctgcctcacaaaagaaaaattagcagatcaacagtaggtttcagactagtaataagcattcacatcacaataacatcctcttttcaagttggcccaatacatagctttccataagacatgcacagtgggacttttcacaaacctgcttgtatccagtgactaaactgatggtgtctcattgacatttttccttttaatcatagagctagtgaggtaaagtgagacttggttaattattttaaaactctgggaccctctaagatagtcacatattaggctcagcatcagtgggtatatacaaataggaaataggcatgtaatctaggcttttactggtgtaagagagagctaccatttctttccccttctctgcgcaacaggtaagagctgtggattaaagaaatcttcacactacttctcaactagcccactttaaaaataaattcatccctcccttttccgagacttcttttgttctcctctttggtgttcttctttccctatggaatacatgtgtctgggcatccctacctggtttggacttgatgggataatggacaggaagctggatcattcagtctctggctctctgctgatacaagcagaaactgagccagttagaccagagttaagcctcctattcatttcatgtatgccattgagcagctagagagtaatgatgatttttattccctcctggtattaagtctgagaggcaaactgacaagtaacaagaaaattcaaaattaaagctgacataccttccttaattcttcccaaggtgcttgggtatgattattatttaatgcttctttgtcactgaaaagatatggggtaccagttaactcatgaaacagtttcagataatagaaattggcctgaaaactaagaccaaaatgtgaaaaataccacagaggcaagaggtttcaggtcaggtggaagcaggtttctgaaatcctaacatgtagactgttgcagagctctctctacagtgctgggcagcattttgcaagagttcttgttttttgtgacatttgccttctgtgtatagccgctaaagctcagccctattgtatcatcacattttccttttcagactcaccaccattgatggtgggtcagaaacatcatccacatacacaaagggcagtgcattgtaacatttgaagatggaaaagaaaagaatcttcagtcactaggcaggctgacctcagggctgtcaagcaaattatggcagtccgggatgtctgctcagaggatcactgtggtgtggcatatgataaatgagtggttttcatggcctcgggctccttcccaggagagagagtctaagttggaaaatgattttagcaatcatggtgggtaagtgtgacagaactcaaataccaccccctttctccctgcttgcatggggaatggcaggactgagtcttaacttctagcatgttcaataaaagatgagtaaaataatcttccctattcattccccctctttgagataaaagtttgcccaggcagaatagcatttttttaatatcagaagttttgctcattaagagagaagggggaggacgaggcgggcggatcacgaggtcaggagattgagaccatgctcgctaacacggtgaaacgccgtctctgctaaaaatacaaaaaattagccgggcatggtggcgggcgcctgtattcccagctactcgggaggctgaggcaggagaatggcgtgaacccaggaggcggagcttgcagtgagccgagatggtgccactgcactccagcctgggcgacagagcgagactctgtcttggggggaaaaaaaataaaagagagaagggcctgccaaatgcttgcctttccgatggaggttagaaactggcattgacaaatggccctcattttttcacctcacctcagtatgtcaggtctttgtattcaagtgctatcaactcctaaaggaatatgaaagaccattttatcttttgagagaccctaagcatggggcaagtttgttttatttcacagattaaagaacgggacttattattaggagaaaatagaagttaaatgttcatagtacccttgatcttcttatgaacagaagacttgaaacaagcctgggcttggagggaattttttaaatcttctcttttttcctgtgcttctgggagtgatgtttaagttctgccatctgtaggacatgtgcattttaaaccttttacttagagcttcagctttttgggaaagtttttatttttgtttatggtacctaaacaacagaaattagcctccatctgagatagtctctgcattattaaaatgcagcttgttgtgcagtgttttaatgggctctttaaggtctttacatattaatgttatataccaagaactattaaaacattccaaataaaacagattcatcagttaagtgctctgttttactgtggtcatgaacgaaaaggacaaactagttatcgtcatggtcacttaaaaaattgtaatctattccaaagacagttttctcataaaaagccacttagtcacataattctggggaagtcctagagagtttattactctctcatttttattcatatgttttagaagccaaataaattaaaacaatttaacctattataggttattttatgaaatatttagagtaacttcttaatctgagacaagtatttcttctgccaacaagaatgtggtaacatattagtttgtcttcagctggtatgtatttaaagattttgaaggcctttaaaaatacctaagtgctaattggtaaggtcaaccaggtggaagggagtggggagtagggaggaaggtgaatataaagtaaaattatacataattttttttgtttgtttttttgagatggagtctcactctgttgcccaggctggagtgcaatggcatgatctcggctcactacaacctccacctcccaggttcaagcagttcttctgcctcagcctcctgagtagctgggactacaggcacgtgccaccacgcccggctaatttttttgtatttttagtagagacagggtttcaccatgttgatcaggctggtctcgaactcctgacctcgtgatccgcccgcctcggcctcccagagtgctgggattacaggcatgagccaccatgcccagccaataatacatcattttaaaatgatctagctcactgtttctttcaaccaaaaaagagtaatagctcctcattaaatatttacttaaatatttcacattaaaaccttcttgaaccaagttggcaacctacagagctgggccctgggtgccctccttttaagtcaatggggtggcagccgaatataacacaagagctgtaagtcaggcaacagctacagcttctattcttcacttagccactcattagatgagtgaccttaggcgagtcatttagcttctttcgggccttgtttccttattggtaataatagaggcttagactaaattcctttaaacagatactacagggctgctgatatgccatgttttggtgagacataaaaatgtaaaaagcagcccctgtcttcaaggaagtgacagtttaatagaaaagacatctataaaaacaaatgcatgcaaaaaagtggtttcgagactgttacataaatttgtactatgtacattgggggcaccaaaagaaaagttgtcaatcctatctgggtttaggtgagagagatgaaattcacaaagacttaacagatgaaatgcttgaactgagtttgaatgccactacccagatgaacatggggatggaaactataagagcacccgtctatagaagtgagtcagcataaagccccaggacctaacagtggtcctttatggctggaatataagtataagataaaatatgcaaaggatcattggaacaaatggaaaagtctttctgtgacataaggattccagaatttgtgagacgctatgacagggttctaagtagaatttgtgaactgttcgtatatgtgttctagagagatcattcttgcaaagtatggcaaaggcttggcaaaggtgagcaaggaaaccattcaggaggctattacagaggtacatggaagagatgataaaggtcacagtgtagccatcgagtagaaggaacagaactataagatgtgaggaaagtgattcctatcaaatcactgattaaatgagggttgagggaagaggaggaaagtctgtaacatcctttcagttttcatctcccatgagtcaattattccaagactgttagattacatactgaaacctctcaattcaaggaaggattttcataaacacacttaatggaaatatatttttagatcttgacagatataatggcatattgttttgaattcattgcttttcaactttggagtcattctctttttaaagggagccctataatcatagtgcagaatgagtcaggtattaaagttaatttgtcatttagaagacataccgtaggcaagtaaataggtactataaagacaccctgaatcatgtggtgctctgttaaaaggcaaaaacaatccattggtgcttacattcagaaattccatgaggtaggtcaatataaatacccaggagactctgagagccagaaacaagagcagcctctaaacagtatccacataacctgaagacagaactcatgctaatgttttccttttttactctgggcacatttgttacttatcctaccataagcactgtctttacatcattccattactttctgccaaatgtcttgaaggtatctctcttttatcccatgccattgattccagcccactgtaagctggctgccacccagaacataccaataaggtacttctggcaaaggtcaccaatgtcttcctaatttccaaatccagtggatgtgtgtcactcctcatcttacttgacctttatgctatgttatgaaactctcctcatttgctctctgtgtgtgacatcaggactgccctgattttccttcacctctgtctcccttgtcactgtcaggtccatgggctcctctttcaaacactacactctccctgggtcatttcatttatacatatggcatctatatataggtggtgttcattcttctggcctgagtcatgcccctatgtttcagaaatggaaatctaactgtcttttggacatctacacctggttgtccctcaggcaactcaaattcaacatatccaaaactgaaccccttctttcttctcctctgcattcctcggtaggcatatgtaggttttcctacttacctcatgcatacttccccactccatgccttctaagccacctttagtcctccagatatgttgtactcattataaactctgagtctttgcacatgctcagaggccttcctgatacacatatgaaatatatattttcttcatctggctgaattttatggaactttcaggcctttgtgaaggtgttgcctccttcagaaaactttcctgcccctagactcatgttgttcgatgcccgtctttcttttgtcattttatagtattttatactgcattgcagcagttctcagtggcttagggagtgagaggataggtggtaggaggattattttgccctccccaccccaccagggacttttgacaatgtctggagatattttttgttataacaaggggttaggatgctagtggcatctagtaggtagaggccagggatgctgcctacatccctataatattctacagtgcatagcaccccacaacactgaattattcagttcaaaatgtcattaatgccaaggttgaaaaactctgctctaatgtaattacctacttatttttctgtttctcccagtagactataagcttttggaaaacagggactatgtcttcttcaacaatgtgtacacaacaagtagcaggttgtttggcacatggcagatgctcggtaaatatgaatgtatgaactgagtgggtatgttgatggatggtttgaatggtttttcattctggcccagagagaaaatgtataatttatatgtggactgagggcagtaagatctgaggtttcactcctgaaatggccctgctgccagttccactgtttgagatactgatcatggggatagtaggaagactgaaactatggatgtgtgtctctattttgttgtctatttaaggatatataattgtatttatttagatatttacctgtattacttgctgagtgaggtataactatgtacatgtttgtatccattgctagtaaccactaataggtctgagtacctattatatgcaaaatattttagcatgctgttatgggaaaacaaagtttggtttaaattctggcttagtttgaaaactgagccatataaccctaagcaagaatcttagcctcactaatcttcagtattctcaactaataagcatagagttgttttgatgattacataaatgaaaatatataaagtacttaatatatagcaagtcctcaataaatgttacttccttctgcctcttctccaaactctctatattagttagaaattgcatttgacacagaagcacagccctgataataatggcttaaattgatagtttatttttctcccacataaaagaagtctggaggtctgaaatacaggattgctttgatgactcctcagagtcattaagaaatcccagccctttttagcctcaacattttactatgcctaaagtgtgaccgtggtactcaaaatgcctgtcatgtctatgtggcaagcagcagactataggacagggtgaagaaggtcatgcctcctctctttgaaagaaccttccaggtggatcacctgaggtcaggagtttgagaccagcctgaccaacatggtgaaacccccgtctctactaaaaatgcaaaattagccaggcgagatggctcatgcctgtaatcccagataatcagcaggctgaggcaggagaatcgcttgaacccaggaggcagaggttgcagtgaactgagactgcatgactgcactccagcctgggcaataacagcgaaactccatctcaaaaaacaacaacaacaaaaaatattggtttcttaatgacaaaactaccatgataacataagatgttgacattagcagaaatgaggtaaggagtatatgagaaccctctgtttactatctttgtaatttttctataaatttaaaattattccaaattacaaagtttatttttaaaatgcaaattactggcacacattgaaaacttgttaatttttgtagggcattatctatagtggatgcatttgagtataatctccatgtgtgtagggactttgtctaacttgttccttgatgtctcctcaagaactaaaggagtacctaaggataataccggggaagagagcgcacactcaaaaaaccccatctgatctgtttctgagttatcgtgcatgctcagtgtattattctgtaaattgttatagcatcctgactagcagctctccatttcatagtccaggagaatcagcatactttttctccataattttcctaatggaacattttatgaaatataagtcctggaggagctggtaaccaactgctagacactttattagaaaaataagggtctgtagcactaatgctaatctaaggaaattaaagtctttttataatcctgtgagattaatagatcaggggttgaaaactgcacagttctaattttctataaattagtcttttctctctattagtgtaaaaaatatctaatgagaaaagtacttgatttaaaaaccagcctcaccacttactaccgaagtggttatgaggaagttttaaaatctctctaagcctaaatttgctagcaaacttggagtagtgagactttacaaggcatatgtacagtcctctattaatgaaaatacaggatagtttactataacaagagcacaataataaagtggttttcataagacagaggcttgtttctgtctcacctaacaattcagaaatggtattacagcttatcgggagcccagtctactccatgttgttgcttaggcacttctggtgtgcacttccacattccagattacaggaaggaaaaaaggaggaaacacacctttctaagggcatgacctggaagttatcacttctactcatatcccattggccagaacccagtcatgtggtcccagctagctgcaaggaattctgggaaatgctttctgtatctgggaagcaatttgctgagctcatacttctgatattttggagattggaaagacaactagcagtgcctaccataagtacctagagtagtgccttacatggaataaatgctcaccaaatgacattctcattaaatcatctggaagataattagtgtgaaaggaataggtaaggagaaacgttttaccagctatgacttttaaatcactcagaattaaagatagaccttcctaggaaactatgtttgcatttgaaaatttgctcatcttcttgtaaattaaaacacagctttacaaaaaataagatcttctattcagcctgaggaaaataagctgcagaagtaatttttttaactgtacttgtttttatatgtaacaactagtttcccttctagttcaggaaactctagtagaattagaaggaaccatgcttggtaaaaaaggaaagatacaaagtaaactgttacttatttttaatgtagaaattcttttgttgcacagttgtaaattctgtaatcataattttgctcctgtctactctttgcatggattcagtttcaagcttttgccataatttgtatttacatacatgggactgcacctttaaggatctatttccatttttcttggtttggtttaattatttcctaaggatatttacagtaacctgctgaacttggacagtttcattccagggaaagtagtttatactgaaccccattcatgctaaccttgcctaggacattcttacattccataggccacaactccaggttgtcagcccctcatgtgatttgtcagaccacactgctccctagctggcagctcgacagagttcagttggccctgctctttgcaatgtgacggatgaacatgataccagctatattagtttgcttgggcagctgtaacaaaatgccatagacttgcttaacaaatttttcatagttctgaagactgagaagtccaagaacaagtcttcaggcaattcagtttctggtgagggctcttttcctggcttgcagatgcccccttctcactgtgtgctccaatgttaagagagtgctctgatatctctttctacttataagggaactagccctattagattagggcccacctttattacctcatttgacctttatcacgttcttacctggcctcctggcctgtctacaaatacagtcacgttggtggttaggactttaaaatatgaattatgggggtaagggggacataaatactcagtccataacactggtctttctttcatttattatgatacccacaaagagtgagtgttttttctagtattttccctatgccattctgggcaacctgcctaaagttttctatggtggaagattacgttagtggcttcctaaactctctttttctaatgagatctctggtttaatggcagtgtttggacccacagaataccctgggagttataagatgttaagaaattaaaatgtgataaaatgatgtttgtagagcactctgcacttttcttgcttacattatttatttaatcctcatggtaatttggtgaaaatgattgggatggtgcagtggctctattttatatattagaaaattgaagtttggaatgttcaatatttctctaaggtcttaggactaatagttgattaacactgagattccattccaggccttcaaatttctaaaccacattaaaccaaatatgagctgaatttggctctggagccactaaaatttggtttcaatccaagttctgtcacttattaacagtaagtgggcaagttacttaactcactaaaatttctcaatcttctctgtgacatgcaaataatagagtccaccttatagtgttctaatgaaaatcaaattatataatgcatagaaataacaaaacatctgctacatagaaaattgttcaaaattgttggttattatttttaagcacatatcaaatcctattcattaaatttaactctgaatttatgttttattggactttaggataaagtgttatttaaattatatgagctattgacagatctccaaacactttacaagtttataaatgttataaaatttatgatatggattttattgagatatgagcatcttaatgatcaacatttgtgcacatttatttatatatttattcatgtatatattcatgcctggtcaagcaacagattaaagcaattaacaattagcagatattttaaacagctgtcagttatactttaagcaagccagtgggattttttagttatctaactttggtatgaggtcatttagttatctagttttagattgaggtcattttgttctcattaataaaagaagctgagtttggtattcttagtttttatctcacaccagtaagccagtaacactcagtatatgctaataattatgattaaagaaatattaaggaaacaaagatttagctgcttgaaatttggtatactgaaaagcctaattaataaaattttcagtttttctccacattagccaggatttaatctccatcaaaatacatatttttctattagtctaattctacaaacccaacataagaggtcattgtcacacagtcttatgtcaaccataatgactggaaggtgctctcctagtgttcccagatttgtcaggtaatttactgtgtatgtcaggataaagtaacaacacatattttaatttgttttgcacatcattcctgattctcatatggaaataattagggaatttcatgcacttctagatttaatatgagtgtgtgtttatggatatataagtaagagaatgttcagatttcatagaggaggtcaaataagcttttctcaggtagaagaaactataccaaaccaagagttaacacacttgatgcaaagtttattagcaatgtaaatgtcattacctctgattcgtgatcagctgaacaaacagtgaagggccactgtgactttcaagctttaggaacagaatctaatgaccttaaaaggcaaaagaactgtttcccactaggtatggatggaagtgattcaattctgagcatcatcatgattggcaattaataatgcaaatgacttgtgttgatccaaaatggttctcagtatctgggcaaggcaactatgaatgtgtatatgagtgaggtagattataacaaaattattttcattctatgcctcatagtctcagagtgactgtatacacataggcaccacacacatcctctaaccatcttgatttgagagggcaagatgaatgtgcctactacattagtttgcttttgtgtataattgttacagttttaagatatggcttaacttgtagtgtgtactcagaaaggagagttactcattaccttgtacataactcatttattgcccttgtaacatatttgttttcttttcccaactacctcttaagagcagggaccctgtcttcgttagaatgaacacaggcactggttcatagtagatgcttaagaaatatttgaatgaatttataaatgaattagagcttctgaatggaagtctatagtacttaaatgtgcaacatacataaatataaacattatccaaagaatctatcaatgtgtatatggatgcacaaacacacatatacatcccacgttcagagtactgtcactagttgaggaaagtgattaatgtctaaggtgcctagccaacaataatagcatatgattatgtaattaagtaataagtaattgtgaaggaaggaaaaactatttagatacttactgattgcttaatataaaaaatggatatatgttagcttaaaaacattatgagagttaaatatatcagcctatgaaaaataacagaaaagcaaacacattgacacttattcatagtcatcagtatttttttttagtaaagacagcacaaaccactaaacaattagtttattcattgttttccttactgtggccataactagtattcatattagtaatttattaggaatactgacacataattatccaaacttttgtaaaaagcgattatagtttttttctgataagaaaaagaaaattttcaatttataaggttttaataagcccttaaattatttttccccaagattaataattataaaggagcataggtccacttatcacattttctaccagaaatatactgggcatgcatgggcaatgtttctctttaaagtagatgctgacactatataattagagaattacaataatgggtcttacagaagaaaaggaaccatattcatatatactttttggcatacactattagagaaactttatgtttcagtgtgagatttatatatctgatacataatcaactttatatcaagtattctctaatgagttctaatgaactagaagtagctttaaatggaaaaaatattattctagcatctcagaaaatagttttggcttattccctattaattttgaccttaaaaaaataagatccctttagtccacctgggcctgggtggcctgcttattttctcatagagggttctaaagcttcttggaaagtcttaggttttactctattagcccaatgttacagggctcttctccatgccacaaatattcatttgcagataatgatactttctactgcctcaatatatttttatatccagttttctcctggattccttatatcttatctgaggaatgcttaaagccgtctgttgtgagattttcctcaaactttctctagcaaaaggaccggtttttatcataacatacttaattaacaccttgatcaaggaggcaaacagtgcagcagagattcctggaacaagatgatcaattggacttaccctgtgtttgttgaactgcctgaattttataagcccatgtggatatggcttagagctgagatccaaacagctcctgcttcctggtctcttccctgaattacatctctgtattatcggtatctcttgccaccagttttctctgaagtcattatagactatatagaatttatgaatcatgttcaaatttgttagtcattaaatatttgtccagaactgggtatatgattgtgcacttatagaaagatgctcacagtataatgcagtaactacggtgatgtggaatataggtattacaggaacaaagtgaaggaatacttcatccaaccttagtgagtcaaaaagatacttcctctcttaaaaatgcatagaaatagtcagatttatgaccatgtaggccatgttagtgtaaatgacatgatgaaggtgaagctccatgggcatgggtaccccaactgtcttgtttaggccacattcccaacatcacgcatagatgtggctcataggccctaaccctcaggacatatgtgtcaaatggataaatggaaaaaaaggattctaagtagaggagtaatgtggttcacttttgatttttagatacgttgatctggcagcggcatgggagatggatccaaagagattaaaactggagtgaaggagtccagtaatgatgtgaagagatgagggtctgaactaggacagaagtcagtcacagggatggatttgagacgttttggagggttacacatgtaagacctggtaactgtgtgcctgtgggaagaaaaggagaggtacggggcaagtgttgtgccagagttgccatcgtctaacttaaagaatacaaggagaggagttatctaagggaagaaacaagttaaagtttttatgcaacatattatcatttaaatgtattccaacttttacttttaaaatgaacccttgaggaaattctaatagatttttaatgaaaatcttgtagcactttaaaatttttaactatcccatgggcattataccagcactgggtcaagaatataaactaaaaacatgggtacctccctttaaaaaaaaacaaaagtcttttaagaataccaaaacacttgggcataactaccacttattcttcatgcagaaattttggtagagagagaactatattaattctttcctcccttttgctttcttttttttcttgatattcttcccctgggtctggcattctgcagtaaagtaggtagaatcagctaccacatggagcctcactcccagacaagtggcctttgaaagcttctcctgtaggaagaaaagctttccaaggaaaggagcaatgcttgcaggccaatgagaattccaaataaatagcatttcgacttctgcttctcaatctggttttaacatttggtgaggggcaaaacaaacccaaccaaagtgctatcattcatttgaacttaaagttcaaataatgttacatttaatttgtaatcagatcattataactatagttgaaatatataattctggtatagtgaagatttgtacgaaatcttgtttttatttttttctcactttttggcactgactctcttcttcttctacatatatgttttattatcacaggatgagtaattttattgtcatatcgcagagcgaattctcccagcccaaataaatttggctttcagcgtggttctgggacatccagttggcaatacccaggaggtatctgcatatacagagctgaggcctggggcagaggcctgagctctgagtagcagtcattggcagagagataataccctgagaggcaagcagaccatccagagagggtagagggccaccagcagaagaccgatgttggtacctgagcagcatcaacatacacagaaacgaaagaagggcagttctaaaaagagaaagcaatttgattagagagactggaggagggcctggagagagaaatatcctagaaggcagggctttaagaagttcaagaaggaaggagtgagagagcaagggaagcaaggagcttctctccttaggtaaagcccttcccccctaacatccctccttccttccctaactcttcagaatcttaagagaaggcagtagttagttgttgttgtgtccatacttataaatgttcacaatctatgctatgtgaagaatataatttcttcaatgtacaagtatgacttcagattaacttccttagtattgcttccatctagttagtttctaggctttgtggcttttaatggtcttttcctgtaagtagctacagttgatttgactgtaatgccagtgcttcaatattcattattttagtagttacccagcagattttatcattgtttattcagagatattttttagcccacgctgctccttattcaggataaagcagataaatatcttgctcagagccaaacagggatactttagattctgcttccatagactttgtactttgttgtttgcactggctcctaaaaatattgagaaggataaacagaaaagttcatttaattgtactgagttcatttattgttctgagcaagtacaatactccctatctgattagtatcacttctgatctgtattttaaccacagaaaggtacagttttgtttttccccaaatagattgtggtttacctatattttccctattgtaaaatgcagtttatgtgcaggattcaaaccccttaattcaggcctgagtcatacttctatcatcaccctcaaattgttaatttttatttgcccgttcctcatgagtaaagattttgttacggatcttaaacagcattatagtaaaggagtgattttgaaagtcattcctttgggttcacaaggatacccttctgtggaaagagaaaatgaaatagatattataataataatgctatactttttatcaagttatgtcagaactcataattaaccttatttttatggcattttggtgagtttgtttttattctagttctcgtattcacagagactgaaatgtaaaaaaaattaagactttatccaaagccacataggcattagatctgagtaactttggcactgctgacacacaacttgtctttttcctctgagcttacttaaaatacttatgaagccttgaaagctttctcatccgttttttatttttcccttacagagtattgatttctatttttttaacttcaaaaattcacatagcacaattgttaaaaagttcaaaagtaactttcttaaatttagcttttaatctaaattttttatttttaaaaagacctaactttacagcacatgacataactaataaataaaacaaacaaatattcatcaatattgagcaaaatgataaattttacttttgaaaagtttgttttcaagaaaaactgaacctatcctttagttttttgtttttttggtttttcttttttcctgatagctgctggcctcacaaagtattgttagcatatcagtttggtgttttggcaaaataaaaattaaaaattatactattcctttcatccaagtctaggtgctattgcttaaaatttttcttccagaatttttcatgtgaaattcttggagattgagaaaagataataattcagatctattaataaagattaattgctgctagagatatactgtgaaatgcatatgcaacgtctgaaaagatatgttacagaagatatgaattcgccattcctaagtcactttcttcaactttaaagtatcaacatttattaggttaacattaaatacttgagagcagattcttgaaatattgactaaatctgaattcttgctataagatttgaaatatctgaaaatcaaatataattgggaaaattctgctactttattatttattaaatagtcctagtaactttaatgatagccacatattttaaacaaatgattatctttgacagaggaattataaatgagagcctcattcaagaattccctttattcatggctgttgtttgtctgcccttctttttggcggtacagaataaacagggcttagtgggaaggggaggaccatacagtctagcacacaggccttgcacaacctcagtctttgtggtagtatgggtaggtagaaaccaaaatccctgagttggaggggttttcaggtcaaagcttagaaatgacatttccctccaaactgacctctcgttctgtgttctttctccatgataggcccttccatctacccaagctgggagccttgctgaatagtccattggatattagccctgtctccaatcagttgtcatgtcctgttgagtctacctcttttgtctgtattcttttctcactacagcctaaccctcggttcatactcaaattgtctctcacataggttactatgatgccttctacttgaacttcttagctctatcagcctctcttttcccacccagcctttgccatatcagtgtttttcctattgccacactagcactctgtatcttaaatgtctgtgtgttcaggtaaacccttcacgaggcagttagctccatgaaggcagggactgaaggtttctggtccatcattatatacttaacacctagtacactatgtggcttttagccatcgttgaaaatcagttggattttgaatacatggatttttttattcataaatatctgagaaggccaggtattattttagaattcctagacacctcaaagttctctgccagaacatggaagcacaaagtggctcctggcccacctcctgtcctgttcaacaagaaggtagacaccctagtcctcactgccaacctccaactacatttcctgaaaatagccaccctgaggccactcccaggcccccacaggcgttttccacctcacaggaagggatctggaaaagagacctacacaggacttggaagtagtccgagggccattagggcatcaacttacagaatcccaggaacccaggatgtggtctagaaggaggggtagggaaggcatagacaatgtgggccgatccctttggcctacgaactgggtaggaatatggccagaggagggttgtgtctaagagccctactacaagcaggagatgatctggatttgttctagagattgtactcctagtgtatatttgtgaaagtgtagcattagcaagaactgtctaatattgtatttgagaaacgccatgtgaaaatatgaatagaacttaaaggttgtaactgaatctttcctaactaaccttttaattgtttgtatttcaagaccacatgactctctgttctgttgtgttctgtgaagcagtttcaagtactgattaagagtacaatgtggaaagccaaaacagggatatgagttgtgagctggattttgttctaagttgtccctttgctggctatggagccctgggcagagtgcctcatctgctgaatagaggtaatcttccttcgggcttgtagtgaaagtacatgaggttagactctttaaaagacttagcttaagtaaatgctcaatagatcacagtgctgtcatcatcatcataatcactgtcattatttttacagctgttattccttattgtccataactgttgtaatgaccttgggcaagtcacataacctctcagaacctcaatttcttcctccataaaaagatgtttggagcagaggataacaaagactttgtccagttaagagcaaggactttctggaattctttcagtgtacactgaacttgaacttgaccccacaagcagtgtttaaattgttaatgaaagttagctactatgcatgtaatatcactatatattctactttaatcaaatgtagtatgcaaaaaacctggattaaatatgcagtttatgaaacaagtatttgctttatagaaagattcactgtagagtcccttttactcacaggctcttctagtacattaaaaataaaatttgatttaaaaaaagatattcggtttgcctgcaacttttcagaaacatatgcagacatttttaatccgtttgaatcacagaatcccttgtgaattgattaactctgattcctctctctgagaaatgaacatggttgcaaatatttgcatacaattcctggagagggggtggtccatggatcctaatttaagaagccctggcataaagccaaaataaagagaaaaccaataaaaatggaatatgttgaggatattataggcatttctaaatgccagcctccaaacaactggctctcttcagaatcagagaaacaaagagagaactaacatttattgaatgcgaactgtgccagacactgtgttaagcattgtataagtgtccttccccttccaaatctaaaaaagacagatattatttctgatgagaaaattgaggctcagagaataagcacttctccaaagtcttttcactattaaatggtaaaagcaaaatttgaactggggtctggctctaaggctacatacactgtgataaaaggccctaagttccttcacatttgttcccaagcccccagatttttattaaagaatagatcacagaaatgtacagatttttatgccttagtgaactcacaaaggaaccagcttcatgttgagagcccatcctttccccctcccatgttctgtgtcatcagagctgggaggacttgcaggagtggtacgttggtgttgggatgggtcagggcagcagagagctgagagatgatggactctcttggctggatatgattcaaaagttctgatcccctacatgccccagtaaagttttctggctgacatctgtgttgaagagttgtcagctgaggagcagagaagtgtccagtcagactcagaatacctcatttgccaagtatcacatgagaatagtgaagacaggccccatttggaaaagaactgcttctaggaagatttattacataggggtcatgttgcataactatgttcaggatactcaactcctccttgactcattcacatttcataagacagatactcccttcaaaaaggagggactaaatgaggaaataaatgaagggccttatatgaatggcagaacaacctaagtcttattggaattctttcttggactgtatctatagccttggtgctataagccaatattgacctttcttcataaacagcttgacccaatactgtgcagaaagcactgtgctttgcacacttaaagaccttatatagtaaggtgagttctgtgtcctcatgttctaacctgtcaaaacaaaacatttgtggtgatttgggaatatgctcacaaatacatttttggtttcaagtcattttaagatatgctatcttatcacctcagccttcacaacatgtcctagaaaattatgctgttttcacagtgatattaaaggcaccgtgagatttggtattttatttagattttcctcatgatttcccacatgatatagaactgcttcataaagttacttgctgtgaagtatttcagagctttatttggcggtaatcaggaagatactacttaatgtttaaaagtaaaatatgcatatttaggagtaactgacatctgataagcaatttttcttgtatgctatggatggtgcaaaagatattttattagtgtaaatttgatacctccttatatcagcaaggcagcataacatagtggtaaaagtatggactctagagccaaactacgtgtgtttgaaccccagctctgacgcttgcctgctttaggatcttggggaagatattttgtctttctgtgccctgtttcctcatctagagaatgcaggtaatagcaagttcttcctttactgtgttaatttgaaaattgggtgaattaatatacataagtgtatagaacagtgttggtgcataataaatgttatgtaagtgttagacattgttatacaaatgagtaaagatgactaataaactctaggtgttagatggtttaaaaaataagttagtttatcctcagtttaggataagtgtttaaatagagtttattctcatattggtcttaagaaagctctagctaagacctctgccattccttctgtcctcttatatcaaatctgagtatcaattaatggcttcactgacatctgtgggctgaggatcctcacatacctgtaaatggaaatgtgtactaagtttaatagatttcagtttgacagattgaataaataccatttctcacacacacccaacatatttttgccaaatgtatgtcagccctgctgtgataatgaaataccaccatactttaaatgttgctaacttcataacagctttgaatatgatcagtgaatactgagggaaaaaataacactaatactatgtgagaagtccttgaaactatttgatgctaaaattgtattttcacatttgaaaatgctggaaaagtatggtcattcattcattcaaaatatgtattgagtacctaccataggcctggccctgctctagaaactgggaatatagtttttatccctgtggagattatattttagtaacaggagataatgaacaagtaaacaagtaaaacatgatcattttagagacaagtaagtgccatgaagtaaataaaccgagcagtgtaatagagggaggggctcactgagatgataactgagctgaggcacaactgaaatgggagcagggagtttcatgctgagggaacagcagaggcaaaagcctgagacagagtgaatgtgatgtgtttgggaaagagagaggaaggacgcttagatcttgggggaagagaggcagtactcagtgaggttttggagcaggcaggggcttaattaaacatgtggtgactgcaggccatagcaaggggtttgattttattccaggtgctgtgggaaactgttccactggagtgacatgatcagatttgtatttttaaacagtttgcttggctgctgtgtgagaaccaaatgtcggagaccgtaagtggtcccggaaagatcccttaagagccattagctgtagtccagacaaatgttggtgtctcggactagtatgtgacagtgacatggatggaagcaggaagatttgcagcctatgttggaattggagacaacacgacttgccaatagtctggatgtaggtggaagctaaggaggaatcaaagaatcacaaattttaaggtcttgctcaagtcctgccttcacagtgaaactttctccagctcttctagcccacttttgtctctcctttgattgcagtggctttgagctgacaatatgtgcaaggcattgttcctggtgcttaggatacattagtgaatgaaacaaagcttcctgccctgtggatgttatgatctgtcctgtaccacttctatatctgtgccactaatttgcattaaattttatgtgtctttgtattagtctctaattgttttggatatattatttttgttctctaaatagaaaagcacctttaggaccagtgaccccacttttcaatttaccataatgtcttgctcagtgatggtggaagcaaaagtaacagtgaaaatatgtttgtttgtttttccccccacagatagcttgtttctaggtttgcctgctgctttaaataagtaaacttgtgaaaatccaaaattgcaattcagatgactagaagggccataattttttcattaaaaaagattatgggcctggcacggtggctcaatgcctgtaatcccagcaatttgggaggccaaggcaggtggatcacttgaggtcaggagttcgagaccagcctggccaacatggcgaaaccctgtctcaactaaaaatacaaaattagccaggtgtggtggctggtgcctgtaatctcagctactcgggaggcggaagcagggagaatcacttaaacccaggaggcggaggttgcagtgagccgagatcgcaccactgcactccagcctgggtgacagagtgagaccccgtctcaaaaaaaaaaaaaaaaaagaaaagaaaagaaaaagattatatagtcactcaagagttactctaaaataacagttcccctccccaatgaatgtaattaaaaatttgtcaacaagtcattatgcatttgtcagggggattcggatgaaggaactgaagctgaagaatcagaagccatagtccatttaaaattaattcaaagtgaagacatcaaaactataatttagaattgtaaattaaaaagaaaattatttctgagttctaaaaattcaaatatgtggactttatagaggacttccattttctacatttacaatttataatcaacagttataaattaattctttaaccaagtcacgttcatcctagcaatgaaaagtaaccattcgaatacacaactaagttggcttcaggttatggctttctgagtttgtcttaaaatataaaaaagaaaacaaaagtcatggctttatgttttgcaaggaagactgagtatcctcataaacactcataggctattgactccttttcaagaccccttatagtagggttggcattgaggtgctattgctaatgcaatgctgtatcttacacagctgtcctgcaggttaattaagcttttgaggactatcccaggaattattatttccatgaaaaatgcttctggattctagagtactgacttaaagccaaaattaggaacatacttcatttataagaggtcttaaacttgtttctgtaattctcataatccatgtactctttgaagatgatcataattatcaatgagcaataaaacctttaatcaggtagtatgcagcagcacagttcttatattaaaaacacagatgctattcccttacgcctacattcactcaacacattcattaagtgccttctctgggcagggccctagacaaacagcagtaaattaagtctggtctctaagccagaagagcttagagctctttggggaagaagacacatgcacaagtaatacacaatcaacattcttaagtgttgtaatgaagatgtaaataaaatgcattgcaggttatcaacagtcttaagtactgtaatggagatgtgaataaaatgcattgcagcttcggaggaaatcaaaatgctttcttctgaaaaaagagggaaggcttcgtggaagagatggcatttaaaatgtcacttgaaaatcgagagaatttaaaaggagacaaaaagggacgagcatcctgggaggcatgacagcatgagaaaagtgatagaacgcataaagtgtgtatgtccaagaaccagctagtgcttcgtgcagtgaacatttctggagcaactacgaagtgtaaggcactgcctaaggggccagagacaaaaagacaaataagatgtgggtcctgtccttgagagagaatttggtttaataaatcttacaaagtgtgagaaaacagttttcatttaagtttgaggatggtgttggatgctgaactgcggcatttgaattggattctgtggtgatggtaataataatgctcaccattcactaaatccttcagtgttctagccaccatagtaagaatttacatgcattatttccttcagagctcctcatgagatatgattactgttttattcctacttgtgagctgagaaaattggggctaagtcaattaatgtatgtcatgtttcccagctggtaagtagccgagtagagatttagacaggtgtatagtattacagagcctgtaactcactgagagaagccacaggagatgtttgagtaggataatgattgatttgagctgttcttcttaagaattcatttgactacaaggtgaatacaatgattaaggaattatgcttgtgaacagctaataaggacctaaatgaaggtaatggcaatgggtatgaaaaaggaaaggaggtgacagatgtcataaagcttactaactggattcagggacaaggaagagggagaagtcaaatacagcttcaagttttagagtctgcatgtaaggaagtaaagaccagcagagaagaaatatcctttagggagtgaggtgaggggataggggcagggaggctgggataagtagtttaattttgtacaagttgaacttgaggtgccaatgggatacaggtgggagggaaaatgcaaaagttaaggttagaaatacaaaagttgagcttggaaaagaggtgatttagaaatgggattatattctaccaatggtagagaggtcaaggaggactgatagaggccttcagaaccctagttttattttgctggagaaatcataagccagattacagtgtttatgaagtaaggggatagtaaaaaataaaggaagggtaggctactctaaaagaagttaaaaggtaagagcaaatagttggtagactaagaggctaacaagaatggagcaagttttgtttccttaagaatggactgactaaagaaagacggtgattgatagggtaaggtcttatagagagggcgggctgtattaactaactcaaggtgatgacttagctaggtaagagatgcctggtgcctcctttggatccatccaagctcttctcattttttagataaccatttaaatgtcacctctctgtggagcctctgtctctcctgtagttttccccgtagaggcttaagtgttccttatcccattctcccactggtcttggtacatacctgcactatggaccagtggttctcaaacatcagcatgtttcaggtcatgtagggggctggctaaaacacagattactgggccccatccccagtgtttatgattctgtagatctggagtgaggcctcagaatttgcttttctaacaagttctcaggtgatgctgatgctgctggtctgaggaccacactttgtgtactactgaactaaactaaaaatatgtgagacgtacaaataaagagcttgggagttcaaggatgcactagtattccagaccgggaaatgttctagaaaaaatactccaagaatcagtcatgattcaacagcaggtaagaaagaatgaaacacttcttcatgaaagaaaaatattttgaagaggccatcaacataatctctacagagcagaggtttcttaggggagagctatcatagatgaagacttttttttgagtgaaaaccacagccatgactataattatactgtaatcataaggaatgcccagttgttatttggggggaagtaagtatagagctagcatactatgtttcatttagaatattattttgttattattcataacttagatgattgagactggaaaaaatgtaccatttctaagagctggttttataattaccattttctttgctgcatctaattattcacttaggtttacctgtccctgatagttactgtgcaaatctgacataagcagatatactaaatctcagaacttggataaatataattttttctgtacgtcactaaagtgttggctgtggttagtaaatgtgctaagttgcccaaccaaaggtgcaaaatccttcctgacatttgcaagcatcagtcatttcaagtttcttttattcattcaaatgcccactaagctaactcatcagtatcaatgacaatcagcttagcataagcaaaacaaccattcagtcatagccacactgtgtaacatggatatatcagatgctttattctgacaacatggtcagatgccactagatgcaaagttaaattaattagatatgagagcaataataaatcagtttagttccaagcctgtataacttcaattttaccataataccctatataactgaaattaggtttttgagttgagatgcatacacgtccctattaattttatcaacatcaaattgacatctgccctagtctttttgaactatatgaatctttatttaaaacctaaaaatccatgggaaaggaaacaaattcttcaggcctaatagaatgcaaataaattattctagtctaacagaatataaataaagtttgttgtgagaacacatttctctttgaaataaaaagcaattttaaaagatttagttgcccacctgagggggaataatcccttgacatataagtgatactgaaaattccaaactgttgtgataagtagatattttgagagaattgaattgttttgttaggagggagatgtgggtgtcagtttgctttatttccattttactatgacagagtggtagtttttgagtagctgggggatactcagaaaaattacatgaaagaaagccacttgtcagtcttttaggatatatttggttctgtgtcatcagaaggttttctgccctctccctggaatcaagttgcaaacacgatcctcaatagtaattagagctaagcggcaattacaggacgtatgatttgttcagaagcactgcctgccggctgtttcctagcaccacatttcacgggagcaccaggttgagatgatggaattatttacttttaaatgtaacatctcgtacagtgctcaaatgcagacgtgaacgtggactgtaaccttaaaaacaaaggtaagcactgctaactgacccacatttacatcttaaggaactttcttatgaaatatgtgacaaaaatataaaacaggtcaaatgaatttcagaaaaagagaaaagtatcagaattaagacaaatagaatttgctaattttgcaactcctttgtctaatggtatcttgactttcctagcctgtttgtatttcatttgtactactgagccactttactaactataatgacgaggtaactgatttcccacatttctttaatctttataagctaccgttcccctttctttcagagtttgtgtgggaataactactaggtaaaaatgagattcatgttcaattcaactatgttagaactctctctcctttttatcttcttttcagaaagtatatttaagctgttgattataaatgtccaagaatccacattcagattgacagaatagtggctggtagcctgtaatcaaattgagtgacgtgggagatttgcactcttgtcacatgatttttatgataggcaccatttcaagttttaatgttccatctagttcacgtcaaagctcaatggtttcatgtttgtttagacccttgggcatagaaatctctctggaaaccaggtaagtttagctcctcaagagggagtattgtctgttataagagtaggtataatttgtatgtatacagtaggtacttgtgaaattctcatttctgttttaatgttatcactttattttcccccaccttttatttaccccaccttactccccacctttttttttttcaattttgccatttgtaaaacatggataaatatattatcagaaaaggacttaagaactcttggcaccaggaagatatttttatctcatagtctccagtgggatttcaggtggcttgaaaaatattgaaagagcattgacttcttttattctatcttattcatgggttagaggtgtaaacactgagggttcagtggacttgcaaaaaatgaataggttaaagccagaaattgattaatttttccaaggtccttgagacactgatgtgtgacctcttggcagacaatattgctcagtttagttattacatacctgatttagggaaaattttttgtagtgctgtattcatcatggcctttgttttctatgtttgcttttcatagaattatttatcccaagcatcattttcttcatcagaaaaacaggggatgatcataagccatgtaaagtttagaaaactacttattgtggtgtgtgtaaaatatatgtaaaaagctacttaatatatgtaaaagcaccttgtgctgtccaatgaaatggtatagtatttgtataacccaggacacaatgatgaatttccgtaaaaatatactgtaaaattctatggtgcactcaggtttctaacttgtccctgtccttcacatgtatggcagataccgtcgtgggagcacgtaataaaaacaatcctcacttgttgcaattgacatgactactggagacagaactagagatatggtctaatttgttaaatcttgtcacagggacaaacttgtcctgaagcaaatattaaaaagaaaactaatacaatgtagttgcaaaataaggcaaatgacaaattttatgagtgctttctagttccctggaagtattatggtgggagccaaagacaaagagatgaaagaggcacacagacaggtacgcaaatgtacagaaacagagagagacagagacagagatgctacatacaggagagaaacaggagagatgagagaggcagaaaagacaggtgggaaagagggagactatggaaacagtgattagagagagttagagaaagaggtgttacagaaaaggagacagagatacaagtcaatcagagtttggaaagttgtagagattgtgcagttttggaactttggattctttttgcatttcttttagctggaaacatgctttctcaagttaaatacattgagcactaggtccatttttgtgaattgtttactttcctttggtgtcttttaaagcaaagggaacttaacagtctgtttgaagttcagaagagaccaatagttaaaacaaatgttttaaaagaaaatatctccattcctttgttgctttataaagcaaatcattgaaaaggaaaataatgagtgctgtgaagaaatgctctactttcagggggacttcttatgaagaagtcattatggccttgacttttggtgttcattgctgggataggagggaattatttggggagccaaaatgaaattccatataaagaatattattcagattttaaaaagaagatcctaccatttgcaacaacatggatgagactggaagacattacgttaaatgaaataagccagaaaaaaaatactgcatgatctctcttatatgtagacttttttaaaatgtcaaatatatagaaacagagaatagaaaggtggctgtcagactgtgggagagaggggaatatggggagatgtaggccaatattgtcaaaaggtagaaagttgtaattatgtaggatgactatatctagagatctaaggtacagcatgaggacagtagttaatatattttgtatgttagaaaatttctaagagtggattttaggtactcttaccacacacacaagtaaccatgtgagataatggatatgtcaaatggctttactatgtgatcacttcactatatatatatgcatcaaaatatcacattgtacactataaattttatatgatattaaaaaaaacccgacagtcaagttgtaaagtaaaaattttgatgactatgttaaaaaataaagaaaaagaaatttcatgtaagaaagtctagtacaaggtcagtataatagtacaagagtaacatgatgcacagggctggggcagtcatttatgatgagggccttcatgtgcagaaaatacttgggtgttcattggagatgttttgcacatcgctagtgccccagaagctgcctacctgactgaagctctaggatgtcaggagaatggcagagtttcaagaagccaggccaactattggcccaatctgttaaatacccactagagaccttttagagtaccagcattccttgggtcacagaacactccatgtttctcaggaaaagggtgagctcacattgtcttccagtcgcccacaggagtgtttgaagaacttagatgccctgcttcactaggttgttcctgctcatgcagtttttgctctactctacttcattttatacagatttctgtcatacagtgaagaggcgaaagggaggaaaatcattttgggagtaagatattaggaaatttctaacaagaaattcgtactaattctaatccactttgcaaaactaagccaaactcactgctctttcttccttctccagatcatccctcaccattttttcccattgtagctccaattttaccccatactcacagtctctgctcactctggccttggcatggccagatcaggcaccccataccaggtttccatagggatggaacaggggctttcatgctgtttgcacagcaaccttggctgccaggtggaagccatctctgccgctcctgggtgagaatggcttatttgctgatagaggaccaagagtggccttttctatgatggccaccatgactatcatactttactagaattttttatgaacactctatagtgcattgtaattctggtggccttgggatacatatgcaaaaagggtttagagcagattttactgtttctatttattcccaagttgtgctttctgggattttattacttttttttgttatttttaacatgggcacctacttttgaatagctatgaagtgtttggttaatatttaagctaaagaaaccttttttctctgccaaagtgggagtagaaagcactagcagagcaaatattaactctgttttctcaaattaaacaggcttgggatgggggaaatatccttttaaaaaggataatttgtataaaccactattcttttcttttccctccttttgtttcttaaataccacagcctagacattgaaagcaggaattgaaattctctgaaactaggagaaaaaacattttgtgccctagagctagaatttatagcagcagctgggtgcactgacctcagagttgctgtatccagatccctttagcctggctcttagtgtgaactgcagaggagaggcctaaagacagagccagaggtctaaataggcctgctgctttgatctcaaatagaaggtcagttgccattacttgaaaaaatgtgtcttctcagatagcatttttgttgttgtgattgtgatagtacttcggtataaaaaccaacaacacaaatgtgagtgtgcctcctaccatgaggctatttaaattagttatattgatcaaaacagtatggttaaagcatagttgtaatgagctttgttcatctctttttttccccatagggaatattaaaagaagtattaaaatgaggcattatactggagattccaaaagcagggagggagtgagggggacaagggttgaaaacctatcaggtactatgttcattacttgggcaacaggatcattagcagcccaaacctcagcatcatacaatatacccattatataaacctatacatgtaccctatgaatctaaaatatgtatatatacttaaaaacatgtatatgacatatatacatatatagcatgtatatgttatatacatgtatataacatacatatataacatgtatatatgttatatacatgtatataacatacatatataacatgtatatatgttatatacatgtatataacatacatatataacatgtatatatgttatatacatgtatataacatacacatataacatgtatatatgttatatacacatatgttttatatatgtaataaaataaaataaactgttataatcaatcttgtgctattttataaattggaaagaaatgttggcttttggccacactggcttttctttcattgaatttctcccattaatcatgttgataaaacagtaaaattaaaatctcatttaattaaatgaatactctctttaaaatgtcagtcaaaattgaaaaagaaaacacaccaaatgctaatcttgaatttttaaagaaggtaatgatgacaatatatgattcttgtacatctttgattgtacagacttaaatattcaaaacagtgttcatgggcagtgagctctaggtttggttctaacatcagtcaggtaccatggtagattaagctctccaaatcccatttttgttatacaaaatgaagggtagattcctaattatgcttacctctaaaattttattaaatataattcttttagaactattcagtgacttgagtaacattgttacacttttcctaggaaaagttgtattttttagggaggtttccaaaataaatgatagttctgcactgccgttaggtctttagcatgctatagactgccatcataactgccaattgttggattttatagactcagagttctagatatacatttttctttttggcatcactagagtctgtgttagtctcccctattcacctcctaaattcagcaaagaagcatcagcatcagagacaacacgtagttcctctgtttgtaatagaaagaggcttcagacttcaagaaagggtcttaatgccattgaggagagtcaccaggcaaatgtagctcaggaccatcgccccaggtctttttgccagtaaatttcatcaggcgctgtgacctcccaatccgttctcgacctcagacaattttagtaaagccctgtctggagataattttggcttctccaaagacttagtaatttagaaactaagcacatgacattcccttttgataagtcaggtgtttaaaaattattgcagaaaacttgagaaagcatttgttagaataccgttttttcttctttcaatttcctttttttgcatgatcatgcttaatactattgggttataagctgagaaactacgataaaggaaaaatattttaaattcagttttaaccccataaatttatttaaattcttaaattctcatacttttcaacgctgctttgaaaaaggattgcagccagtgaagtatgtcacatgtttgacgaaactatagtttgtacagtatagcaaataaatcttatccattttttttaacaacacttaaatgtaagaaatccaagtgggcaagatattcaggtataaatgaatcaccacttggctgtacatattctattgccacagcatctgaaaagccatctgttgcatctcggtgaaagattcatcgttttgtgtaaaagctggtgtattactacaaaacccaaaggacattgtggctttaaatccctcctgatgcggcttctttgatgttttttgatgcagcacttcattattgcttatcaacttcagtgcagtgctcaaaaggatttatttttaaatgtaacattctgccaggctgctgccatggtggctgctgtcggagctctttagggagaaccctgagcttccctaagggaaattcaggcacgtaactgccaattgttagattttatagactcagagttctagatatacatttttctctttggcatcactagagtctgtgttagtctcccctattcacttcctaaattcagcaaggaagcatcagcattaaagagaaattttatttgctcacaaatcattttgagcaaaatcaagctggcagtagaaaaaaaagaactcaaaaagcatcattgtcatcctaaaattatacaaacttgacagtatttgaagatattcttattgggaaattttgcctatatttgtcaaaacattttattagaattaatagcattgactgcattttttaaaaattctgctcatttataacatacagaaaagtgcacataagtgtgcagttgaatgaatgtacacaaatatagcatacatgtgtagctggccccccagatcaaggaaagaacatttctggcatcctagaagacactctgaatgccctgttttagtcctctcaccctccacctcatcccatcctttctataaggaaagccactatcctaacagaataaattactttgcctggttttacgctttatataaatggtatcatacagcatgtactcctttattttagttcttttcttcaacgttatgcttgcaagatctattggttgttgcatgtaagaatgtgccatttgttctcattgctgtatgtcattgcatgaatgtttcatcatgcaaacatacaaaaattattctttctattgttgatagattaactggctagtttccagtttgaggctattatgaagaatattgccataagcattctagcacaaatcatttttgttagttatatacctagaagtgaaatttctgggtcatagggtatttatatattcagcttaaatagatattgccaggtagtttttcaaagtagctgtgacaatttacactttaatatagagttctagttgctctgtatccttgtcgacacttaatattatcttcatctttcttcatcaaattgaaccattcttgtggatatgtagtgatacctcattgtagttgtaattcacatattcctaactactaatgaagttaagcaccgtttttgtatgtttattggccattttaatatatgcttttgtgaagtatccaactcttttgcccatttatctagtgttatcattttcttattgatctgtaggagttctacattcttactaatagaatatattcatcaatttttttcttttatgattaacatcttttgtttcctgtttaagagaccttcgcttagtccaaggtcacaaagatactctgtttttctattttcggttttaccttttaatccagaaaccctaagaataccttgaaagcctaaaaaaagttaacctcaacatgttctgttttctctatactttttgtttatacagttccgctccaccattcttccatatatacccctcaaacacaagccattcctcaaagtttatcttaagagatatctcatctgtcgaaacatttatgaaccccatttatgaaccagatgcaatttctttctctcttgaacctacttaacatttttttgataacacatgacccctgccgtttatggtaagtattaatagatttaattattcatgctctcctgggatatggcatagtgtcaaggattaggagtagttagtaaccacagtaactgaagcttatacaatactggctatgtatcaggcacaggttgaggaaatttgcatagaaaaacctcagttagttttcccacccatcctatgatatagctactcttatttttcttaattatagaaaagacagtggaggtataaataagtaaaataacttgtccaaggttgcacaagaaagcagtgctcccaggagtcttcagcttctaacatatctgtctgctgagttggtgcttttaacaggtgtagaacagtgttgcctgtgtcatcttaatttaaaaaaaaatttaaggcttgattctatgctaaaaaaattgagggaagaaattttttctgcctagatgtccacagtgcctgttagtatattaaaaactctaagatgcgttgcagaaaagaaccgctttaagctttgttgaagcaacattttctaaatgtatttgatgacagaatctttttcatgtaacagctttacatataacctactttagggaatgatgacatgggctttaaagtcagatggacaggagtttggacccaggctctgccacatactgagtgattttaatcactctaaacctcacctttctcatctgtaaaatgggaataataatataaatatcatagagttgcattataatttaataagaataagggacataaatcacttagcacgttacctggcatgcagtaaaatctcattaaatggtagcagttgttattattattttcttatcttaaaaagtaaaataagttctgacacagttcataatccctgtcattgctagcactgtgccttgttagtccctcataagtatttattgaatcaaataatactattatttggggaagattctttttagataaatatattcattatatatcttggttatttaagtatcagatactacactaaggtcaaataagtttcaactaattcccagttgaatactatatctgtttggaggtccagtattttaaatctctcaggtttatggtaaaatgcttctccctcagctggagaatgtatctatatgactggaatgttttcacctatacaatttggtgaccatagcatggtagtgaaaagcagaattcagaagtcaaatagcctgggttgtaattctggctcctctacatacaaactatatgaagttgggcttaatctctctgtgcctcagtttctcatctgtaaaatggggctaataccttgttaatcagattgcaaggactaaatatgtataagtatatatatgagtatatgtaaatgagtatatatacctacaattgtaatgaacttaggatagtgcctgttacatagtatgttctataaaaatgttatctctgttattgctattatgagaccttttcaaaggcaaaatcctttatcagtcacctcccctattcatatagccacctcttagtggccatgctttgatagtctcttggtaaattattttcttcacctagcagatttatgaaagaaaagaaatgctgagagaagtggaggagatgcggtgatggcaattatcctgatgagagaaaaaatatacagtattaggtgtaacaaagctgggaaagcaatgaaaaaagaaaactgagtatggcagaaaatctgaaatgccactcatttaaatttctttaaagaaatcttttggagttctataattgatgttgcctcccctaacaggtttttataatacgttaagtttttaatttcagtactcactgatgggaacatgcataataatggcataagaagaaactactcctgcaggatatagaatatatacagatttgatctcattctgcaaatgcttcttcatgcatatttgttgactctggcatactcttttgaagaatgaggtgttttctttgcttctgttttggcatataaagaagagccactaggaagtctcaaagttataatctaaatgggcttttaagattatatatctaaaggccaaagactaaggcaataatttcaggtgtcatctgtccttaagtaaggttgtattgtgatgtattatgacataatccattaacataataaggtacctattatgttacagaggcagttggctgaaataatagttttcttatgatcatattaggaaattgtcttttacatattattggtttcatagctatagatgaatcaacttgtattttaccatcaaagtgaaatgtatgcaagaaatttaattacattctaatgggaattcatattcatatgaatacatggaatttccatgataagagtgaaactggtggactaaaggagatccccaaatgcctgtgagacctggactctgtctggtgtccagactctcgatgctgttgtgagaaggaattcaaggacaaattgggatagagtgaaagtacagatttattgcaaagtgaaaagtacacacttaaggaaggggattgtgggcatactcaagagaagtgagtcacaccacagggtttggagtttctatatttatgggtatctttaatcaagtggtgggatattcatgaagattcctggaaagatatgaagatttcttggaactgtgtgctacccatttttacacccaatatgggtggtctcagaactgtcattacactggtgggtgtgtgatttagtatgttaatgagagtataatgagatcttaggtgaaacctaggtcaaatccagtgccatgttgggtccagttagtcttagccagcttggcccacaccttcgtttttcagggtcttatcagcccctaccttatgcagctatttcaacagttttcttctgctaaacatgtgaaactgctgtctggaattttctattctcctgtgaccaccttgtattactcctgtctcaagagtgttaaattattcctgttaaatttttggagtatgcctgcttatatatgtgtatttcattttagtacaggaagtttgataaatatatgcattcagtgacatgaaaagttttattatcaaatagggcggcaccctattttgattttattcattatgactttattcattatgatatataccagattatatactatgttctgaaacagaactacaaataggaggtgtcttacgtaatattgccagatagtttatacaaaagtcaaaggttggttctgtcccatgagaatagcaacgtaatgggtatattgtatcaccttttgcattgaaatgcctgctcattatattttcaacatttttttctcagcaagtccttcacttttagagaaattaagcattttctttcagagtgcaatgcattttggccaaatttccgcttgtaactcctgctgactttcaggcacccagaggtgagaagaaaggattcttagcagcagcagcagcagcagcaaaatctgaaatatgaagacagagagatcagagcatgaaataacttgttcaaaaaaatgcactttgtccctatttatttaccatttgcaaaaacaagcaataagtcctggtgaagcagtattaaaaagtaggttttaaaattgaaaacagcaaggttgaggtgaaggattaatgaaagtatagtttatatttattcagaagatctaccagtactttaaaacaatctgtgtttaacatggcaaattgtctgtcattaaaatgctaatgaaatggtaaacagctgctaagttttttatgctaatgagtagtggcagctaagtagttctcaagccttgtctttattagcatagagatttgattgggtaagggggatcattgcgcattccaacctttgttgatggagtaatctgtttgtgaagttccctgttgcattctatttgatttgggtttgttattacaaagtgactctcaccaggccctagggagccatgtattacacagtattatcagagccaccattgtgggcttagagaaagaactttgcttccctccaggagactcacaatggcaaaataattacacatttgtttatcattcagctttaagtacaattagtctataccttactttagacttttaatgattatagtaataataaaataggccattgggctaacataagaaatatctctgttttttaatttagctaagagtttaaagcaaaacttttaaaatattttaataagtgcccctgcaacatttgatatatttatataatacatcatcttagatctacaagcactgaagttaacattacctaatttgaagagtaatgtgtaattaaatacagggtggttatatgaatgacaggctgagatcagagtatttacttgagcatcagaaaaaaaaaaattactctcaatctatacttttggctggttctatttttgctgaatgctactctgtcttccctaatggatggggctgacctgaagacttgccattacagataaatgcttcaggcacccttctctcttttttctcttctgtttttaggatcaatgtaaatgaagtatgacagtccattaaacactattgccaataatgttctggaacgatttgaaatatgatgcagagtttattaagaaaattcattaccaaaaaggatcattgaaatagaaattttaatgagtctgggaaactgtgtaaaacattggtggaaattttaatagttggagcattatctcatactgttcatttctccttgaagtcaataggggatgttaggtatataattattgtgtggtcctgtataggcaggccaggaaaaattggaaccctcctacactgatagtaatcatgtaaaatgtttcagaccctttggaaaacagcctgccacttcctcaaaatattaagccatttagttatcagatgaccaaacaatttccaaaatttgacacctaagtatatacctgaaagaactgaaaacatatatccacataagaacttgtacatgaatattcaaagtagcattgtttataatagcaaaatagtgggagtaattcaaatgcctatcaattgatgaatggataagcaaaatttgggaaatccatacaatggaatattattaagccttaaaaatgaatgaaattctgatacgtgctacaacatagataaacctcaaaaacattatgtcagatgaaagaagtgagtcacaaaagaccacatcacacattatatgatttcatttaaatgaaatgtctagaatagagaaacctaaagataaagaaaatagattagtggttgccaggagctagggatattaggaggaaatggggagtgactgctaacggataagtttcccttagatgtcatgaaaatgttctaaaattgattgtggtgatggttctacaattgatttggtttagcccaaacctcatcttgaattatagctcccacaatccccacatgtcatggaagagacctggtgggaggtaattgaatcatgggggcaggtttttcccgtgctgttcttgtgatagtgaataagtctcatgagatctgatggtttcataaaaggcagtttccctgcacacactctcttgcctgccaccatgtgagacatgtctttgctcctcctttgccttccactatggttgtgaggcctctccagccatgtagaactgtgagtccattaaacctctttttctttataaattacacagtctcaggtatttcttcatagcagtatgaaaatggaataatataacaactctgttaatatgctaaaaataattgaattctacaattcagatgaattgtctggtatatgagttatacctcaataaagttgttatattaaaacaaacaaacaaacaaacaaaccttacatgccagagtctgcctaccagagagctacctgcaccagcagttacttttctatactacatgaaagttatacactaaagaaggatgcttgttactggagaggagcattataaatcttctactcatgcattaaaccagatatctaaagaggtgatagcagaagttctagccagagtatttagacaagagaaagaaataaagggcatcagattggaaaggaaaaagtcaaattatcattatttgcagatggtatcatcttatatttggaaaaaactgaagattccaccaaagaactagaactgataaacaaaattagtaaagttacaggatacaaaatcaacatacaaaaatcagtagcatttctatgtaccaacagcaaacaatctgaaaaagaaatcaagaaggtaatcctatttataatagctataactaaaattaaatgcctaggaattaatttaaccaaagaagtaaaaaatctctacaatgaaaactatgaaacattgatgaaagaaattgaagaggacacacacaaggaaatggaagaatattccatgttcatggattggaagaatcaatattgttaaaatgtccatactacccaaagcaatctacagattcaatgcaatccctatcaaaataccaatgacaacattcttcacagacatagaacagactatcctaaaatgtatatggaagcacaaaggatccagaatagccaaagctattctaaacaaaaagaacaaaactggaggaatcacattacctgacttcgaattattctgcagagctatagtaaccaaaacatcatggtactggcataaaaacagacacatagaccaatggaacagaatagagaacccagaaataaagctgtacatctacagtgaactcatttttgacaaaggtgtcaaaaatatacatagaggaaaggacagtctcttcaataaatggtgctgggaaaactgaatatccatatgcagaagaatgaaagtagacccctatctgtcaccatatacaaaaataaaatcaaaatgtattaaagacttaaatctatgacctcaaactatgaaactactatgtgaaaaaattggggaaattctccaggatattggagtgggcaaaaatttcttgagtaataccctccaagcacaggcaaggaaagcaaaaatggacaaatgagatcacaagttacaaagcttctgcacagcaatgaaaacagtcaacaaagtgaagaggcaacccacagaatgggagaaaatatttgcaaactatccatctgatatgggattataaccagactctataaggagctcaaacaagtctattttaaaaacctgaataaaaaatgggcaaaagatcggaaaagacatttctcaaaagaagacatacaaatggcaaacaggtatatgaaaatgtgttcaatcattattgatcttcaaaaacagacaaatcaaaactataatgagatatcatctcaccccagttaaaatggcttttattcaaaagacagaataacaaatgttggcaaggatgtggagaaagaggaaccctcctccactgttggtggaaaggtaaattaacacagccactaaggaaaacagtttggttattcctcaaaaaactaaaagttgggctaccatatgacccaacaatcccactgctaggtgggtatataccccaaagaaagaaaatcagtatatcgaacacatatctgcactcccaagtttatagcaacactattcacaatagccaagatttggaagcaaactaagtgtccatcaacagatgaatggaaaaagaaaatgagttacatatatacagtagagtactattcagccataaaaagaatgagatcctggcatttgtaacaacatggatgaaactagaggacgttatgttaagtgaaataagccaggcacagaaagacaaacttcacatgttcccacttatttgtggagctaaaaattaaaacaattgaactggacacagagaatagaatgatgattactagaggatgggaagagggcaggggagtgagaatggttaataggtacaaaaatatagttagaggctgggtgtggtggctcacacctgtaattccagcactttgggaggtcgagactgatgggttgcttgagcctaggagttcgagaccagcgtgggcaatgtggcaaaaaccccatctctacaaaaaatacaaaaattagccaggtgtggtggcatgtacctgtagtcccagctacttggaagactgaagttgggggctcaccagagcccagggaggtcggggctacagtgaaccatgatcacaccactgcactccagcctgggtgacagagtgagaccttgtctttaaaaatagtaataataaagttaaattaaaattaaaaaaataaaaatatagttagaatggataagatctagtatttgatagcacaacaagctgactatagtcaacaataacttactgtgcatttcaaaataactaaaagagtataattggattgtttgtaatgcagagaaaggataaatgcttgaggggatggatacttcatttaccctgaggtgattattatgcattgtgtgcctgtatgaaaatatcttgtgtgcctcataaatgtaggtacctattatgtgcccacaaaagttaaaacaaaatttaaaaatagtcaacaaaacaaatagaggtgacagttaatttaactgctaaaaaggatatttgctacaataatacaaaacaaattagaaataaaaagttgaaaacaaaaatttgaatccctgtcctaactactacctgtcccccaacaccctgtctgaagccaagccataatcaacccttttagtctttaactatccaatgtctagactacccatttacttcaaagtaagagcaactttcagaaagtttgttttttttttaagagaacaagttgaatcataactttgagagcagacagtaactatacaggttcaagttttctttttcttgtaaaaaccctatatttatctctgatttgcataaaacctgtccactagccattcagtaattcttaatagcaaagagtgtctggcttcaaggggttcctcccctcttctctcctgcacttttggcgagtcagaggcaaagcgttggccaacaggacattctcattctgtctgaccctcctgccagtaggatctgtctactaggtgtcctggctgaatctgagcacccctcagcccttgcccatagggaagcattgtgcaccactgtcttggataatgaggaggaagatcctttttattgtgtttactactcctgtgccatttgcttacttacagcataactctcttgcttgcaagttgcagctcaacagacttgttcttgcactgtaggtttgggagggagatggatgtgagcaagaaattgaattcatttttgttttgttcttggcaggcagtacatgccacactactacccttcctgctcttgtgcgcacacctaccctgatgatgcagccttcactggatatcaaaccatttatgtcttttccagtggacagtagttctgctgttgggctctttccaaattttaacacagtgagtaaattcatttctattttatttgtgtcctcctccatcaatttcattacatttgtgaatagtcaatagatacagcctgtttccaaagtgtgtaattttagaccatatattggttatgctgctcagttgtgctatgaaagatgatgcttcacccatgggagtagcccaaacaatagccagtatgtttattatacaaatatttccacagaaaatattttctgaaaaattttcacctgttgtgttgcacaattttcatagaatttccagtggctttagaacatacatcatttctgggatgttattcacatgctcaggaatacaatttagagataccaagactcattgatttttcccttctcttagaaaaaaaaaaatgactgtaggatttatctctctggctgcatttttatttgggagatactttagataaaatgtgaatcctacacaaacaaaatttctatttgggggctattgtagatgacgtgaatttgactctattaagaaaaagaaaaacactcattttaaatctacatactagtgatctgcaagacactttgacattttaaaacataggataagtgttagtgaattacctataattactgatgtgcttcagctcagctgaccttcttttatttgaatgaaaaacatttgtaggtgtgtcaagtggagcatgacatctttcaacaatataatttagcataaaatcaatctgtagccagattctaaaccttatagtaaaataaaatgttcacagttcaggtgaatgcatacattgtctgcttgattgttaaatacagttagttggggcatgacagtctacattaatgatacagcattgtaaatgctgctgtaataaaaaaaaattgcattatcaacaccaccagacagcaagcatctgaagtactgccaaatgtttcattttgcaaacctatcttctgtatgaagtgaaaacagcaagaggatttttccttaaggattgtcaataaaatctgctgacaggccctctgtcagggcttagtgctggaaggtaattagggggtagggcatcagccagctttttacagagcactggccttgatgtagtgagtaaacagttaaatgtttttgtcttctttgagcttttcagagacaagtcaaacagttaaaaaaaaaaaagttacaaaaggcgagcattgttcctagagcagtggagtggctcaataggataaatcatgcctgccttggtttcattgatccacccgctgcatcccagaacaccacattacgccatttcaaagaatgcaaacttgaggatgccagtggtatcctctattcaaacatgtgtgacacattccaatcataactgaattaagctatacttcatagaacatttatgaggtatttgtgttttgattaatgtgcctttggaagttagcatttatagccattgctgaagtctagttgctgtcaggaagcagcattcatgatgcaagtagtcataaatggcttactgtggctcacctctctttattttattttcttttactttttattttatttatttattcatttgagacagccttgctctgtcgcccaggctgtagtgaaatggcacgatcttggctcactgcagcctccaccttccaggttcaagtgattcttgtgtctcagcctcctgagtagctgggattacaggcgcctgccaccacacctggctaatttttgtgtttttaatagagacagggtttcgccatgttggccaggctgttctcagactcctggcctcaggtgattcaccctcctcggcctcccaaactgctggggttacagatgtgagccattgctctgacctctttatttatttatttttttaacataaataatacatgaatacttactccaaaaattcaaataaaactttagcatttgaggtaaaattagaaagtcatattccatacccctgcacatacttttacttccttcactagcggaaggtggtcagcaactggtatccatccttctaatccccttctggaagtatgttatacatatacctaaaaggtacccagtcacagtttttttttacaattgcgatcatatgattagcactaatctgttagtcactttttttgttatcaaaatgtcttacatctgcctctctgttttgaagagctgtaaaacaaaaatggagagaataccttcataaaggatttttaaagataaaattacaatttcataatggtttgttcatgttgcatagagggtacagatgcactaacatgtcatttggtttgtttgattaattgtacacagcaattaatcttatgatatatttgagaaaacccaaagaataattatattaatagaagttcattttttttccttcttggaagagtataaacataattttcaaataaaaatactatttggctaaggtgaagaataccacaaagaactacatgaaataattattttactctccctgtattacatgtgtggcatttatcaaacaggagcccttctagtagtgtattaaatattaagtcattccaagtggcaccctctatcatcttgcaggaaataaatttatgagatcattgggtgacctatgatttttccctgtgagttgcaatttaaattactcttaattcttttcctacagacatttccattctagtgtccaactcacccaatagaatacctaagggaatgtcatgaaagttattgtccacattttcctaggaaaacgctattacatcaccactaataagtatactggattattgtatatttgtgatgttttacatctctcaaagtacttagaccttgaaacactttggcaggcagtcattattactcttattgtctagaggaagaaagagagttattgaaggaagaactgagacttgaattagaatctttttaacttcaaaattcatattcgggctctttacgtccttgagtcttttggcccatatcaccttccacctcattcattgtgaacaaagctcaatcagaaatctttgtgctcttttctggaagtgtggaaggcaattttcagcagaatcattaactagaaggaggaaatggtttttttgaatgtgtataatagacctctacaaacaacacgaagcagaatatatttgaaaaacagctataatttcttgttggcaaatttttaaagtatattgtactcaattgtccacttgttctttgaaaactaggtgaaatctaccttatcgttttatttttaaccaaggttaatattagcaaatataagaaatgaggtcagttttaatcttataattattatcagaagaatgaaaacactatgctctgagaccatagttgaaagttttggaggtttgatgttttgttattctctttaagtagatttttaaaaacataatgttttcctctttcttatagtgaagtatgataacattatatgataaacatagcaagaatgaaatgagatcttattgtattccaaaatagaacagatgcctgttctatgctaagttgtacctgatgaagaaatatgcttcatggtgttcttttagtggttgccttgccttatgcaccacaactgacagaatctctctcaatgcatatgtatgtaaaaataagcaaaaaattttagtctttgtataagcagagtttaaagagacatgataaggaagacggagtttgaatcgttgatgatttatgatggagtacatgtcaaggacacatgcttggaggatgatgatgttaactctgtgcttcagcagtgtactttacagagacacagttttgagtcatttataggtaaaagcctgtgtggaccaaaacataaagttttaaagatcttgatcttaatattccaaagcctgtgcctggctacccactaatgctcattttcaccattgctaccccaccttcaactatgtgtcattcaaagttcaacttagatatcacctccttcccagaaagtcttctgtgactcttcaagtctgaattaagtcccaccctttgtgtttccaaagtagccccagattacattaattatagcagttgtcacaccatagtttaattacctgttaatctgtcttcttcactagaacatcagatccttgaggacaggggctctatcttattcattttagtatgatgggtgtctgacacaggtgctcaacaacattttttggaagagaggaaagggtcccagttccttggttttcaatgttcatactcccccatctattaaagggaataataacatttatgagtcccttctaagaccaggcgataagcccaagtgtttaacttaatttatattttcctgaaaactgtggttttttttgttgttgttgttgttgtttggttggtgttttgttttgtttttgtttgtttgagacagagtttcactcttgttgcccaggctgcagtgcaatggcaggatctcggctcaccgcaacctctgcctcccgggttcaagcgattctcttgcctcagcctcccgagtagctgggattacagtcatgcgccaccacacctggctaatcttgtatttttagtagagatggggtttctccatgttggtcaggctggtctccaactcccaacctcaggtgatccttcccaccttagcctcccaaagtgctgggattacaagagtgagccactgcgcctggccaaactgtcactgttttttaatctaaaggcaatagttataaactgtcttccagctatagtgcccagctctctctgtttggctggtgtatgaatattggcaagtatttactacattctttgtcccagaccccagctttaagagtatttagttaaaaacaaaattgttagttactgagttttattgaaaatatatgtaataaagagtgttgggtttggggagaagataagcaaattaaataaaacaaaaacccccttgtgcccaataaacttataaggaaaaaatgaagtaaacagacttgataaagcaagataaaaaccaagaaacatcagcaaactgaaaatcgctaccaaagtttatagtgttcaagaaacaacagaaaaaatctttttttctatcttagtagagatgttttcattttttgttattaatttttctttagatttgccaatttatccatggtcattctttaatgactgtatataatgttgtgggagctgccaaaatacacacaattgtttcttacattagaattaggatctcctatttcctttattgtggattaaattttcatctttgttcacaaacaactgggataatacttggtgtttagttccccttaagaagagacttcttctgaattgaaataaattgaatacttaccaagatggataatattaatttaatatgataaagtaagtacatttataagacatatttacatatgtagattgctatgaactgaatgtttatgtcccctcaaaattcatatgttgaagtcataacccccaatttgatagtgatggtatctggagatagagcctttggaggtaattagtgttagttgaggtcatgagggtggggccctcatgatgggattagtgccctataagaagagcatagagagctttccctcctctttgccatgggaacacacagtaagaaggcagccagctgcaagcccaggaagacagccctcactcggaaccccaccatactggcaccttgatcttggacctccagcatccagaactatgagagaataaatttctgttttttaagctacccagtatatggtatttggtaatgacagcctgagcagactgaaacacatacccaacttacatgatgtgacagtaagtaagtgaagtttatttttagcacctgcacattgtgtacatgcatatgtatttgtgtaactgttcagagctatagctataatcaagagctgacttgggaccacagccacctgtcaatttctctgccaattggcaggtgttttatgtgcctatttatttgaaatgtttttgtgagtcctgccatgtttttacaactgctctaggaaagcacaagtacaagggcagtcactactactttattgcaggaggctcaacaatcttaattttgtgaaaaataatctgatttttactgcctaccttgaaattatttttttcctgagacatgagcaaatatgtgggacaggataaagatgatttcaaagtataaagttccaaaccactgtatgattctgtgaatcatccatgacaagttatgaaatgatttatatgattaccatttattttatcattctagaacctctgagattctgactcatttgtggtttggcaatattgatgaatattttttaaaaatttttttcttgtagtataaataataatatattcatcagagagtttctaaataaagaaattgggaatcaaattcacatttgctttgcttttaattcgtgctatgcttcccatgaagtgttgttgtaaggaaacctaaagctaggacatttaactttttaccctgcctttaatatctttatctatttaatgaagtctttatttaaacatatgaatatgtatttttctcttatttgtatatttttaaatttaagtagaatacttttgcaacccaaatgttaatttttgccctttgagtcttcgtcactctaatagtgcttgctgtcattaaaaattatgtattccatatttcttaggatactagtatgtccaactgactctgcttgaactgacacatttatcccagtcaaataaaaaagaaaatatggttgagtttttattttttgtgacatgcttttaaatatattgaaggattatcttgttctatgttttctaaaggagtgcatagaactaaaatatgccaagatgaaattttccatggttactcaaaatcacttgaagaggggagaggttgatggcctattgttaggcttagataactcaacagcaacattccccagatcattagaaaaaaaaatagttatagggaatctttgaaatgtggtacaaaactaacaaagattttgtacaaatatttaagcattgatttctatgcctagaaaattttacatttctattaatttttttttttgtttgtttgtttgtttgtttgtttttgagacagagtcttgctctgtcacctaggctagcatgcagtggtacaatctcagctcactgcagcctccacctgccagattcaagctattcttctgcgtcagcctcccaggtagctggaactacagatgcacgccaccacacctggctaatttttgtattttttggtagagacagagtttcaccatgttgcccagactggtctcgaactcctgagctcaggcaatccgcctgtctcagcctcccaaagtgctgggattacaggtgtgagccaccatgcccggcccatttctattaaatttgacagagagaaaaagtatgtaaatataccatggatggggaaaaaacacatagtgaccatctgcactattgtgtccctcaccctttctttttccttttcttttcttttttattttttttttatttatttttttttttttgagacagaggttttgctcatgttgcccaggctagagtacaatggcacaatcttggctcacggcaacctccacctcccaggttcaagcgattctcttgcctcagcctccctagtagctggaattacaggcatgtgcccggttaattttgtatttttagtagagacagggtttctccatgttcatcaggcttgtctcgaactctcgacctcaggtgatcctcccgcctcagcctcccaaagtgctaggattgcaggcatgagccacctatcccggccgtccctcaccctttcaaactacatgtccttttaaactttaactcatgtcccttgccttactcaaaagcctcaagatttatcttactaagggctttgttttcaaatctccctcttctctacttactcttgaaacacctttagagtatgcagatgttatttatatggtatgtatttattgtatgtttgtataatgcatagtcacatttttttctctttaataaattgctttttcagggcatctagtaaaagtcactcattcacaaccatttactgcatgtctacatgtccctggcattgtgctaaggagaaaggttattgtgatgaattagacagaagttgctctctgtctaatagaaattgcttcctcttgtataattcaccataacataatagaggattgtggtcatagtgaacagtcaattcatttcataaaagctgcctaaaaatatcagattgagactttgatggtcctttatgaggtaaaagaatgtaaaatttcaggagcctgtgaaaagaggcatctgtagacccaccatgctgtgtcctcttgtatgtccctttctttatcctagtcccaatgtcacatggttctggggcctcatcttcagtgctagagtttcaaggattatgtgtacttggaggggacatcagattttctggcaagacaagtctttagtcttggcgctgtcccaggtcagcatttttcaagagtagagtcaacttggaaaaagtgtctatgttgggccctcttcttaaaaatttgtatcttattctacactaatattcttaacaaatctacagataattaaaaaaaagaattagaagaagaagaggaaacaggaaaattttaagagaaaaattcttagcttctctcagtgaccaaaactttatgtctctgtggtatggtagccaagcctaataaatacaaaaaagtagcaaaatgttattgtataaaacattcccaccagctcagaaaatgtatttctaaattagttgctctataaactttaatcagtgatagtggcctctgaaaaacttttatcaaaagcttgcgaacccatccaacaacgcagatctgtttttacttccaccttctagatttttgtgtttagaattaagtctcacatcccttgggggttggagagacatgctttggaatattctggttcctttacttttatagttgcttttgagggtgctaaagatgaattggagtgctgtttagcaatctgtgaagtttcaacatctttgtagagctcagtaggaatcttgaaaaaacactttttacagatttgctttcaatttaggtttaccttcctttttatgttctgatacttgaaatttttgaaagacacaaatcatataaatgataccattttcatgaaattctagtatcagagggatttagcatatttcaaagacgttttacattgattcttttaatgtacccacatatgaaatagattacatgtgtcattgttgtgccctttttgcaaatcagaagattgaagaatagaattgagtcttctcatttattctagtagagagccctaccactgaaaaggaaaaacaaaaaatctaaatatcagaaaagcaaaagctggtctccaccatactatatcttgaacttaaatatgtgtacttctctcaggttattcatgtgcgaaatatttttttaagtacccaataattcccatggcttctaaagtcaagttgaaaattctcctttgcagtgtatttgattcaggagatagattcatcttgtcagcctgtacttgttttctcttattgtgaatacagtttcttgagccaactaaagatctgagtggtattatagaaaatatacccgatatttttcacaggcttatgatttacaaataagtagaggtgcatagaatgaaattctcaaaacacatgtctggggcctacttaatttctgtgtttttcccaggtagacccaaacttctctatataagatggtccattgccattatagtatgatcaaatccataaatatctacatttcccaaaatgagctgaagctgttagatgctaaaatgattatgaatgactgctatcacatggcacatttttgaagcacttaccttttgaaggaactagtagcatttatttatttagtcagtcactcattcatcaactatatcctaccttctccaaaaagccatttggagagttctttgggacctcagaaaagtaactctacttactttgttctaaagtaaacttctgaccgtcctacctgggcttgcctctgttcatgctgtccggggaagcagaaaccagaataaaggggagaacaaggtaggtgattcacttcattgtatagggaaaaaaagcaccggactaggagttagaagactgatgtctagactcatagtctttgatctcaagaaagtcactttgtgccagttttcctcattttcatgatgtaataccttcctatttttacatcatgaagatttgagtttattatatttatgaggaattgagggtatatgactgaatatttagaaaatttttggaatttaatgagaggctgtgaaaaaattataagtatataacatatccccatgctatttctaataacttaaaatacctataaatatcaaatgagattatgtttacgaaaggatacttaaaacagcaaagctctattcttacaatattgatagtttaattaatatttctatcccttttatctctttttcctaattacctcaaataaaccaagttttatatttatcacttgggctggctgtgtacattacagcaatcctaattaaggtagatgctaaagatatatatatggctaagaccttgagtttaagaacataacactccagtttaaaatagttattcctggtacttagcaggtgctcattttatgttagctgaatgagataatgctagagcatacttaaagatcacagtcacttgactgcctggaaacagtacagaggtgctgccgctgaatttggagcagggattggaagagaatatattaagtggaggttgggaataagcacaaccagtttgaatggattctattttaccctatttacctccagtgatatttaggtttcaaaggctacatgccattttgaacctgagagctgtgtccctatgatacattgtcatagagtagtaagacataatgtttcttgctatatttttaaaatactgttgacttccaaatatagaccccttattcccatgttattcattaatcaaattgcaactaggttaaaatggcaatttaaaacacattttaaactaagtcataataatcaatatatcaaattatccttcatgtattgataatagaaatttattccaaaaatcccttgaactttgactcttacacatctccctttaccctacccactcctccccctcccacacacctgttttcctgaatttaaattgccaatcacatgaaaaggacccccttaacctgtgctccgagcatggcgtctaattgtaagttcgctgcctactcaaaaaagattagtagtcttagattctatcccaaagtattatatagacctcaagggtatgtacatatgcataaaaaatattttttctcagaatgcaaatatcagcctaaataaaaaattttaaattacacagactaagatattcatagctctacagctgttagaacagcagataaatctaccagtctttagacttctgaggtggtggggggagtaaaactgatacatcttacatcagttccctcagaaaagaactaggtagaaagacagcctgtagcatagagctcattacttcttgtgcaatcagaccttccattgttttcagagagtgctgctgcctcacaggcctggcccctttaatggatgagtagcttctaaagaagcattgtgacacccagatgtagagttctttgaagctatgcatctggggaaccttcattttgttacagtgcaagggtaatgtcagaatttcctggagtcggtcatcacaggaaattatcagcaattcatagactcccttttacatttgcttcagcctctagggtaatcacaaaagattacagtctccatttcagctctcatatcactgaaatatcctctgccgagagcatgattgatttccagaggccagcttttaacctcagctttgggagggccaatggaactgtagtggtttgataactgccaacaactgacattgtgatattgttctattgtgaggcagaaatttggtgattcttgactaattatacaaaatctttttaataaagtggcatatcagcgtcttgtgttgtcaggtgtaggtatttgtctgattataattagtattacaggttgtggggaggcagaaaggtgaataaaaatttcagatgagtttcatgaagactgaagggccaagcatcctgctagactgaatttcaggaaagaaagcagaataattcagaaacatttctgaaaatctttataaggagtgaatagattgtaaatacaaatgatttttgcctcttaacagcctttttgtgaatgttacggagacacttgacatgtttcatgacaacttgctacgtggttcatgtaggtttctcttcattgtttgattaggaattcttggtgccgtatccatggccaacatataagcaaactggatgtgtttttaacttggtgatttcatttgctctatttattttcctcttacatatgtgttagtctattcagaacatatagaggcagagagggctttgcgtatatttgaaataaatttggtaaatgaaatagttttgcctggaagtaactacatttccttacaaattcagaagaaaagacagttcaatttaaactacttttggtttgaaccatagcctccttgcagtcacgtgagaataattataaatcaaatggacaaatgttgaatgtcaagctgaaccattaacagagccttattcgataaagcgattatcactgcagagcagagtgaagcactctattaaaggtctttattttactttacaactattgtatattttgtacactataaatgcagagacaaatttaaaccaaaaatgttttccactaagaagagctattatgtgtacacatacctatttatacaaaagggcaatagcagatgaacagaagacataaaatatttttgctatcaactttccacagaaccactcaaggaccactttcctagctaaagccctaaaatgttaagtgtgacaaagtgagcctgtgaggaggagaagcagtagaatcaacattgatatcactgtgacatccttgggtgggaatcagggaaggggaaacagctctaactataggatacccagttaaaaaggatatttatttatatatttctatttatttatttatttttgagatggagtctcactatgtcacccaggctggagtgcagtggcatgatctcggctcactgcacttgaacctcccaggttcaagcgattctcctgcctcagcctccccagtagctgggattacaggtgcccaccaccacacccagctgatttttgtatttttactagagatggggttttgccatgttggccaggctgatctcaaactcctgacctcaggtgatcctcccacctcggtctcccaaagtgctgggattacaggcatgagccctactgcacccagactaaagaggagttttagataaacagcaaacaaatcatttttaatgtcagtatgtgccatgcaatgtttggcacatacttttttaaattatttgctgtttacccctaaaattccactttaactggacatcttatattattacttgctaaatctggcaaacatagaaggagatctgggttcaggtgttacctgaggaggctcaaacaagtcactaaaattctccaaatctttcttcattttcaagcgagaaagactaaaatcaggctggtagatctggggcctgatctgtctgctttcaccagaactcagtttctaaaaactgagttttattctattgagtttccagttaggattttgtttgggtgggtggggaggttctggggcttaaacgaaaacaatttttttttgaagtttgaaaatgtagatgatccctgacattttaccactgtgtaacggttatgtggcatgtggaattaagggcccaaaatgtttaagattagaacactgcacatttgttaatttgtctagagctttactagtgctcaattgtcatatttcttcttagtgaaagggtaagaaatgtgttggcccccattatggggaaaaatgcttcatttccacttagctttgcaaaatgaagaaatatattcgaacagaaatatattcaaaggtccaggtttctcttttgcacttcttcctgcctggaggagttttcttttcatgttacacatttttaatttttgtcatggacctcagcatcaggatatatctgattagttactgaacagcctttcaaacttagctttgacagaatggttttgaaaggatgtcagttaatgcatgtggctgttcaggagatgtattgatttttagatcgagaaagtttattattcctctagtctcttagaaagcccttgtaacatatttttgagctcgtttaccaaaaaacaagcaattgtatcctatttggatttggagatttagcaccagtgtttttttaaactacatctataagtatcagcaagtattcttcagttactcgtatactttttttcctctcctaaaaaataaagaatcctattttataaaaagatatttctcagatttatttttggcactgaattttatgttatggaaatttaatttgaggacaattttggggattgttttcaagtcactatttaaaaagaaaacaaaaggccaaaaactgtttactgtcttttagctcagatatttggcctgtcctttcaaactttgggatggatctctcttcacatgtgctatggaataaccatttctcatgacctacactccagtgaatctctatttcacattttacacatctactgaaaaattattttttagtctgtattcctgaaatatttctcatttcatttcacccgaaggagatacaatactaaataaggaaacacccaacccattttatttagattatcttggtgaatctagtttctgttcctatcactcagaatagtatactataaccagttttgttcatatttatctttgggtgatagagtttattgtcaattatataagtcttgagctattcgttgttgctgtttaaatatgaatatatctcactgagaagtataaagtataagtactttgaggacagtaacttctccacatacaaaacatattgatagcacttatcatcattttagttcttcttctaggctactaaaattcacaacagaggtaaattcttattaattccctgaaagatttccaggtagtttttcattttgcttgaaacacctataattttctcatatttttttcaaaagggcatctactaatatcatatgaactttttgttatgcatgatctttgaaagatgttacagatctttaaaatcttatgtatactttgaccaaaaattaggaacatcaaatcttgaagataaaatgaaaaccctatcaagaactttcttagcatcctgatggaaaaatacctgtctcccctaaagatttccagtcatatctaagcatttgcttattcaagaatggaaacaaacaaagaaaagcacagagttttcttagaagacataattcggctcattaccttaattctttttccctacattgaaaacagcagttgcatttggggttgagggtggtctgggcttctttaataaatcacattaaccaaccagacctttcagtgtgcatttaaaacctgaatatgaacacctatgcgatagaatttcagttatttagtttactcatttaaaactcaaataggaacatcaacgccaaaaacattgctgggtgttgtgtgttagtgactatgaggtataagtaaacatttaattaagtcccatacccatttcagaaataaactgaaagtcttatttgttaaactgaactttttgaaaagctctttgaagtggcttcttaaattacccagcagcataactacagctttgctgcatcactcttgatccccgcagcatggaaagtcaccaggcatgtagagctagccaggaaaatggaacattttaacatttggactgaccatatttgttacacacaaggatctactgtgagagttagacattcagctccagtcaggtacccaggcctaaccttatggcatctcctattaacaaagtaactattgtctgaagaagaacttaagaatttttttttctactcagaacagtttaaaagttatctgtcgaaagcattactaggtttccactaaagagaaggagatggtgaaatcaccagttcatttgcttttagcttttttacttttaccatttggtaactccttatggttctaaaagtataaaagatgaaaaacattattttgttgtaatatcctcacacaaaactgttagctcttagacaacatatgtatttattttaaagacaaaagaagtaactcatgatcattttgctattcactcaccaagttccaggccaaccacgctgtgcagaaacctgttagaaaggtctccagatgaaaggtgtctagtacttagtactcatccttagagaactttcaaaatgcagattactttagtttacctttcttcttgggattatgatgatggtggtagctctgagatcagttgtcttgctacttggtagttgaaaaaatcctctgcagacatctcacagactgacagactgtgttggaagctgaggagcgtgtctcttagtctacaggttttaccacttgtatgagtctggattctgtatcaacttctctaaatcatggaagagtgtttttttgttttgttttgtttttttgcatatttggtatgactttacatgtaaaagtatctgaattacagtgggtatcaaggcaacaaaaatgtgtttttaaaaattttcctggtaaaatattgtttctttcccattcttctattttattttatttttcaatgctacttacaaccctctgaaaataccttatttattatgttagagatttgggtctgggtcttcccaactagaatgttggatatttgaaagcctattctccactgtatgtcaagctcctaaaacaatgtatgataggtacttaataaacttttattatgtgaataaaatttcaagaaaaatatagtaaatatataaacaaattggaagtcatacatttataaatgtgtaatatgttgaaaaggagcaaaaattcctaaggagagaactgaatatttaaagttgatatgaaacccttacctctgaaagagttgcacttcttacaaccagagtcatctagaaaaaggacattattttatgacagaaaccccaaaataaaatgaagatgaaatttctccaaaaaaaaaaatgaccagaaaatacagagttcagtcttcttttcaaaacagatcttcaagatacatcacaggattttttttttcttgactttagtcatcctttctgtcaatggaatatacaaatattgtttggtgaatcccagagcttttcaaaggagacctaacaatatggaattagagtgaaatatatcaagctttctaaattcatagtttagaaaacagaggaaaaaaatgaaatgctattctgtactctactctgataggctgcctcatctctgggctgactcccttgtgttttctatcgggaatatatactgccattaaggaagccctagaaaattgggaaaaactgaaatcctggggtcctgcttaatttcagcagctattagatgttgcctgtagtcaaccagcctcaaaatacttaaaagcctgcaacattttgataaaatagtagtagtagcaatagtaatgaagcttcactggatccaggacttagatgtaatgtaacctgtctgttagtttctgaagtatgtgttgtgttgttattgcctttataacagttctgagtgactggttaactttctgcctgggtagttgtatcccagtgaaagaggggaccagttaatgttgcaagccacaaccaatatgtggtttcagcaaagagctggggattcttgaagaaaccatctccccaaacatttgacccttggtttaataaacggtttgtggagagagtgacatgccattcatcttcctttcagcagaactgatagcattcaggtggacccttgtcagggtgctctgggtaggagaagcagtgtcagcaaggcaagcctcagcttttacacgctccagatgcaaacatgcagatcccatggtgcatgcactccctgtgtaatgttctatttactgtatttttttttctttatttctctttttttcttgagacagagtttcgctcttgttgcccaggttggagtgcaatggtgcaatcttggctcactgcaacctctgcctcctgggttcaagcgattctcctgcctcagcctcccgagtagctgggattgcaggcatgtgccaccatgcctggctaattctgtatttttttttttagtagagacagggtttctccatgttggtcaggctggtcttgaactcctgacctgaggtgatccgcctgcctcaacatcccaaagtgctgggattataggcgtgagccaccgcgcctggccatatggtgtatttttaatgagccttctgaattgaaatccaaaatagtacaaagttctatagttccagcctgggcaacatggtgaaaccctgtctctacaaaaaattagctgggtatggtggcacatacctggaatcccagctacccagaaggctgagttgggagaatcacttgagcccaagaggcagaggttgcagtgacccagactgagccactgcactccagcctgggtgacagaagagacactgtgtaaaaaaaaaaaaaaaaaaaaatctgtggttaaactagtgttgccaacaatatgcaatcatttgtatttcttgatctttaagagaaaaaaattatctttgttgttgctgtatctgttttctttctattgaagttttcaaggatttttaaaaagtaaaacatcaacataaaagcatatggtcagagtctttaaatatgaaagacaaaacccattttaaagtaactttagagaaatattgctctttagcgacacagctatcacttaaacatgttctttcatgaatatttgaagttctgttgagaccctatggtcacatcctttcccataaggctgatattcaagaaggaagggataaaaaatagttattctctttgtactactgtaataataataacgatactgataataatcatgtctgcctcatgtgatgatggagactgtaataccacaatatcacagtttaaaagttgatacttagccaaacttccagaaggcccaaagtcacaagggtttgtagctgcggtctgcttagcagcaaatcaaggacaggtgcaaatgatgactgccacttgcaaacacgtaatttctaaatattcccaggactttttttttctgtgtgcaaacccaacagttataatgaggaaagaggacaggacagcccaaatttttatttatggctttcctgaagttgcacaggaagtaatgggcttatcctaagaatatgagaaataggtcagaaagacaaaacctagactcgcttttccagaaaacttttccttaagcaccttaggtttgtgtaggcagcaaccttccagactgcagaagttccaggaagtcttatccattcttctccaaacccataccctttagcagtgcgatgcaatacactcatgattctggcagtgtttctttagcagggaacaatgttgggggagattcctacctgtgtttgaatgccgacctatgaacttgagggtgattcattattgaacctctcaaagcctttgattcctcgtttgttaaaggaggataataatcatgtctgcctcgagtgatgatggagactacaggaggtaattccttagtatagttcccagcaaacctcagtaaatcaaagctcctcttacaatgatgtttattattgttattacacagctagaaaaaagaaaaagaaaatacccctgggagaataacacatggatgtcactgtcagaggggaaaaaaaacccaaagtatgggtgggggaagaggagacagacctttttgtgcctctcatgcctcattgttttgcttaatggcaacttcttttcccagcctccaattgagtagagtttgtactacctttttcactttttaactttttaaattatgcccttttttgtgttttactcattttcctatccagtctgagacagcatctaaaacatattggacctctagaaatatttgctcgatggctgactttaaatttttttttttttttttttttttttttttttttttttttgagacggagtctcgctctgtcacccaggctggacggcagtggcacgatctcggctcactgcaagctctgcctcccaggttcacgtcattctcctgcctcagcctcccgagtagctgggactacaggcgcccaccaccacgcccggctaattttttttatttttagtagagacggggttttaccttgttagccaggattgtcgctatctcctgacctcgtgatccgccggcctcagcttcccaaagtgctgggattgcaggcgtcagccaccgtgcccggccgactttaaattttaaaagtaaagaacctgatttctatttctgtttaatagaagagctaccagggcctactatactggataagtaataaatgcctaccaaatgctttttagaacattggttaaaatagttcgttaagtttaaggtaagatttccccatctttacaaatagtatgggctgggcagggtggctcacgtctgtaatcccagcactttgaaaggctaaggcaggaggatcacatgaggccagaagttcaagaccagcctgggcaacatagtgagaccctgtctctataataaataaataaaaatttaaaaaaaaacttagctgggcacagtggcacatgcctgtagtcctagctacttgggaggctgaagtgagaggatcatttgatcctatgagtttaaggcttcagtcatgccactgctctccagactgagcaacacaataagtctctgagaataaaataaatagtacagataaaagaaagtcctgtacaattctcgagtggtctttttgtttcgtaatgggggtgatgcccagttcccatcccagtgttacctgatggctagttaaatccttttaagactcttataagaatagaactcaaatttcatgcctcttgaaaagtactgggatagttgaacaagtttataattctattttctctgcctaaagtcccatgtagcagaattttctagagtctaaatataatctagtattatgtcaagtcgcttgagcacacagcccccatcttagattcatcctacctttagtgaagtgctgcagtgtgtttattttccctgtgtctaggtttcacttgcagctgcatatttttatatgactttttacactgtggagatgtaaattactttttggtttacccagagaaagtaatgctctttaaaaaaaaaaaaaaaaaaacgcacacagatttgtagtctctgtaatcttgaagacaccaaaaaaaaaaaattgttcttattttgatattgaaaatatgatagatgatataaggccagcttcattaatttgttttataagtactacagtataattgttaatttgtctgtacatggcctccaattacctcctcagttcctggtaacagctgcaacctcatctttcacttttattacctaccagttaattgcactaataggtcttgcttttcatttctgcatgattttcattagaaaaagtggcaagtgttaacttttgctgccttttagttagtgtttcaggctttttactcaaagaaaagcaaggaaaatgggtctttaaattttcatgtaattgtgcttcctagcctcaaaattccagatgactgcttctaacttttacttttttagaaaagaagaggcttatttgagaccaataaattttgccaggtaaggaatattggtagctagatctatgtgatagggtatttttttctttaaaaaagcatctttagtattatttcctaatgaattatacttttctcaatccatagacagctttatttgcacaatgtgaactaacatgagctaatttaatatgactacttaataagacatttgttaatgtaaaagatatattataaacatttaagaaatatttttgaaagtacttgttcatttttaacaatcgaatgtctataaaatgccaaatgaatctttaaaaatcagaatttgttatgtagttgcagtacctccagtaatttttgagtagtctacacatgaaatcattatgatatagaacatagttttgactgtactaaaatgagttacttgcatttatcacattttaagatttatgataatgtttttattaatcctgaactttttattcatcctgaaacttagtgatagaataaaagaattatcatcgatttagttacatgcatctcattatgactacagagaactagtaatgcactagcaaaggaaaaaatttaagttaacataaattaacatcatagttattttatctagcttttagagcattgtactaatgctgagaacaaaaattgagaattttaccactttatactttttaaaaaggtatctgaaagccctcttcattactgtcacatttggatcccattgaaatgactcgagtatttgtagttattgcatcagagggcaaatactcaaaacattagcttgacagtgtctgtttcaaaatcagataaagtgacaagtggggcattcttttttattccaattaaagtctctattcaactaaatcatctaaatcatgtcccccaaaatgacatttaaatataaaaatataactatagaatttaataataaacagcagaagaagagatttagactagaagaaaaagtgaatcttttccagaaaccttaaggaaatacagaatcaagaggaaaataaaggaaatctgttccaagtgagacagatgggggtacaatcttgatacaattagtgataagttatccaaaggatgaaaaggcagaaaaagttaatgacaagtagcaaagaaagtgtaaaagggctgtgcttatttagttgattttatgagaaaaattaggattacatatataaactggaggagccaattctgaggagagtttcatgaaggaaccttcttaatctggtgctttttagagagcagatggatggaaacttgcctacctttctatttggagtgctcagtctcaacttacctttcaggatggagagctctcagccttggggacacaaaggcatattttcaggccaatgtggtgcaaatgtgagatttgggcagaataaaactattaggggccgggcacaatggctcacaccggtaatcccagcactttgggaggccaagtcaggcggatcgcctgaggtcaggagttcgagaccagcctggccaatatgacgaaacccagtctctactaaaaatacaaaaaaaaaaaaaaaaaactggccaggtgcggtggtgggtgcctataatcccagccactcaggaggctgagacaggagaattgcttgaactcaggaagcagaggtttcagtgagctgatatcgcaccactacactccagcctgggccacggagcaagactctgcctcaaaacaaaaacaaaaacaaaaacaaaaacaaaaaaaactgtattaggagttatgtaaaaaattatgtaggcagctaacaatttttaaaacttaatgggaatatttattttcaaagatttttttggagatgtcaatagatacaatagtctactaagaacttgaaactagatattcgtaaatgtatcttttgtctttctatgtttgggcatggaaacagctaggatatgtggattcactttgaggaaagttttaattttgatgttaatttcaatgtattttttgaaaggagtaataggaaagtgtacattatttctatgatttattgtttaagtgtacttcaatttgatttaaagaaaaatattagtgtatggatatggcaaaaaataatgaaaatagcatgcataaaaccggtatttagggaatattcatatagtttaatcccatgtagttcacatatcaccagatgggaagtatttttcagagcctgagatcagaaactatctcaataaaatgctcttgttttttaactttgcaaaacagtgggcttctttcatcctgccaagataagttagcctgttttatttttaagcctgcataaactgattcgccatgtctggtaactgtcagaaagtatagtttcctattttgcaaatagatagatgggatttaagtatttgtgtttgtgaataaaataagaaagtgaactaggaatttattttctgaccttttgagattttctttgtcacatagttttttaaattattattctcattgaataaaatttaatacaatcagttatgaccttcaacagtatgaatccctagattttccagtaatgatatgttagatttagtagttaaacataataatgttaagaaggtttttcttttttacttattaaattataatatataaaattgaccttttgagggggaaaggtctatgaatttaatatatgtatagatttgtgtaaccatcacattatagttaggctatctctccagaaaactcccctcttagcatttttttttttaagatggagacagggtcttgctgtgttgcccagtctggtctcaaactcctaagctcaagtgatcctcctgcctcagcctcccaaagtgctgggattataggcataagcccctgcacctggaaccctcttaaaatttttaagtgtcccaaatcaccataactgttctttataataggaatacattgtcctgtcatctttcttgaaattgtagccaaaaaatagattaatttattattcaataactcttcaatccacttgcctttctaatgtatttagcttcttctaatggctaattttgcattttgtcgatttataatcatgatcagagatagtattcatttctcctctctatcaaatatcatcaactaatccaatcttaatctctaacctcaggagatttcctagacaatggtatcaatagatctgtcctcattcatattacatctgttatgtaatgttttgctcatcatctgcattgttttttgaactaccagttgtctgatgtaaatgttggagattattatctggagtacacaagagaatcactgctgtgtctcttttcataggctctgcagatctaggtgtttcttttcctgagtgttttaatgactatgtgccatactttttctgttggagtacttgtatcactgtatatttctctgaatatatataatacatgcaagccaaaaggggaaaatcacaagctataaatcaaaactttacttgattaatatttaaccaagggttgcatgtcagccaatctattttaggcatttaagtgtacagttctgacatgcattttcagtagaatgaatttcagtctatagcacatgaaagttaacaaattattttaaaatatatattcagtcaatactttctgtgctctgataagagcctgtcatttatgactttaccataaatcaaaaattaagaagcataaatatatgtgtaataattgtcattgacatcatttgaggccatcttaagtattgttgcctcatacagggaaaacattaacatttttagctgggcatagtgtggcacatgcctgtagtcccagctactcgggcggctgaaacaagaggatcacttgagctcaggaggttgaggctgcagtgaactatgatcacgccactgcattccagcttgagcaacagagcaagatcctgtctcaagaaaaataaaagttaattttaaccttgacctttggatcttaagttttcttgttttatgattcttctaaggtttttcaaggctccttctagagacattaggtttctggaaatatggtgattctctcgtggttttttctgagttatgttttcaaagccattttttgttttcatttttgtcatttgtttttgtttttaatttttggagacaaatatattactgttgaaggagactctttattatctttgtttaggaactaaaagtttaaactttatggaatatttcaactactgttatttgctcacactgttgtcttttctttgaagttacaaattgactattttttcatttgttcttcagatggatcctgtgcaaaaagcggttattaaccatacatttggagtatccattcccccaaagaagaaacaagttatttcttgtaatgtctgtcagcttcgctttaactcagatgtgagtatcaccttttcattattctctgtagtttgtcagagctaaaagtctgattgatctaaatacgtacatttcttcatatttacatactgtagcagccactcctattggtagcccactaatttcaggatgccagatttccaaaggatttgggttcaatgcctaaaacttgaacaatagagtatggttggccctctgaatccacagggtccatatccatggattcaacctagatcacatcgaaaatattttttagaataacattacaacaataaaaaataatacaaattttaaaaccaatagaggattatagacaatagtctataagtggctaagatcaaaaattaagaatttatctatgcaatcagtctcaactataccattttacaattaatctcactaattatattcacttgtcaaaaatgcttgaatatcagaaaatatgaaaaaagttttaaaatgcaatgaagagattttaaaaattaaaatgcaataaatgtggaagaaaaccatttttactatttgatatcaattgccacatttcatgtttgtgtcaaattttgttaaatacctaaaagaattactaatttcctatatttttcccagaacataaaatatagagaaagtttcataaactattttatctgtcaagcataaccatcctgctaaacaaagataacaagaaaatggaacaaatcactctcttttatgaaaatgggtttttaaatttataaacaaaatagcaggaaagcaaaataaacaatattagaatatttgcaatatccaattaccaagtaaagccaatgaccgatgtaaatcagaatccgaaggctgcatataatatgtggtatttcctgagttacttgacccctgtagccattttgcaaagagcttgttacagaattaatgttgtttagaaatactaaaataataatctctcttgtttgcatataccattaaattatgtttcgataattctacataggaagcataataaaaaatcatagtcattggaaaagagatgtttatcatgatttatgaaattatatttaatataattttaatcaaaagtccaatgaattttttggtacatgataaaacttcatgttcaggaatcaaaatgtacctaaataaactgagaaatatacagtgttaattcatttgaagtcttaatattgttaagatgttagttcttccccaattgatctatagatccagcacaatcctgatcaaaatctcaaaatgtttttttattatggaaaatggcaagctgtttcttaaatatacatagaaaagaaaagccctagaatagtcaaaacatttttttaaaggtcaaattttgaagacttaatgcttcctgattttaatacttactctaaaatctacaataatcaagactgtgaaactggtgaaagaatggtagacacatggatcaatggaacagaacagagtccagaaatagactcacaccaatatagtcagttgattttcaacaaagttgcagagtgaattcaatgaagaaaggctaatcttttcaacaaacagtgctagaagaagtacgtattcatatgtaaattcaaaaaacgccttgactactacctgatacaaaacataaaaattaattcaataggatcattcataaaataaaaactttaaaaaaactattaaacttctagatgaaaacagtagaaaatctatttggctttgcattaggcaaagatttcttagaaaataaagaagtgtgaatattgatatattggactttatcaaaatttaaaacttctactctttagagacacttttacactgttcagaaaatgaaaaaacaagctatagactactagaaagtatttgtatctgcttaagaaattgcatacagatataaataatttataactcaataataaatgataaaatgggaaaacaattttaacaggcattttaccaaagaagaaatatgaatgatgaataagcacataaaaaaatgctcaacatgtttaacgattaaggaaatacaaagtaaaaccaaaatcagatagcactacacctattagaatggtgaaaattaaacaaattgataggatcaaatggctaggatgaggagcaactggacctctcatacattgtcagtgagaatacaaaatggtacagccactttggaaaacaatttagcaattattaataagaaactttataaagttgtacatacgtttcccatatgatccagcagtcccacttctaagtatatccccaaggcaaatgaaaacatatattaatccatatgtgctgcttaattttattcataattgcccaaaactggaattgacccaaatgtccatcaactgatcaataaacaaactatgttaaagccatacaatggaaataaagaaataaaagtaaatagaaataaagtaaaagtaaaaagaaagtactgatacatgctacaatgtggatgaatctcaaagacagtatgctaagtgagagaagtaagacacaaagactatatgccatttgattgcactcggataactttctgcagaagatgaaactatggggatagtcagatcagtgtagttaacaggggctaagggttaagttagggaattgaccagaaagggaaatgcaggaacgtttttgaatgatgaaaatattttataactttattgttgtgatgtttacatgacagtctttgtttttcaaaattcattaagctgaatacctgaaaaaaattttactatatatagagtataccttagtaaacctaactagaaaaaaattaatgatatgagccacaaaatattttataaataggagactaatttatgatagagatataactactaaagtatattaaactacaattttactactagaatgaaagtatgataagacttttgtaagaatagacacaataataaatactgaaatagattcaagtaaattttacagtattgctcagttattgttcaaatttttagagttatacggagaaattaaagtctgttgttatataaatatgacatgaaaatgtttactacttacctgaccacttataaaacaaatgcccacctaaagacatgctgcatctttaacactggcattctcagtgccataaggccagatgcttgaaaacatctctcagtacaatgcaaataatagatttcagaattaaattgcaaaaatcgtgcaaaagatgcaccattttatgaagtccactaatgtaatagagaactgcttggtttaaagccactcacaaataaggatttgcctattagaagagttaatttaagaagagtaaaataacaaggttgatgatagatagattcttcaaaacaagagatgttgaacactgactgaataataggggtttagggacaattatgaatctctcaaattaaaaaataacatattcatagttcaaaatcatgataatattaaaaaacatattgaggctgggtgcaatggctcacgcctgtaatcccagcactttggaaggccgaggcgggtggatcacttgaggtcaggagttcgagaccagcctgaccaacatggtgaaaccctgtctctactaaaaatacaaaattagccaggcgtgattgtgcacacctgaaatcccagctacttgggaggctgaggcaggagaatcgcttgaacccaggtggcagaggttgcagtgagctgagattgtaccattgcactccagcctgagcaataagaacaaaattccatctaaaaaaaaaaaaaaaaaaccaccacacattgaaaaaactatccctttcctcatcttcccaacctccatgtcattccctatttgtaatcactttaatttttttgcatatctttatatctttccagggcttgcttatgcaaatataactaagtatgaatacatattatttcttcccttttctatgtaaatggtagcatactattgacactcttctttgccttgcattttttatgtaacaatatatgctgaagaatttttttctatcagaacatagcgagctcccatactctttttatagatgtggtaggcaaagatgcccatatcctaatttctggaacctgttaatatatcttacatagcaaagcagaattaaggtagtagatggaattaagggagctaatattctgacctcatgataaaaggattgtcctggatcatcccatggtcccaaggtaatcacaaggtctttaaaagtagaagagagatgcagaataggcagtcagagtgatgctatctgacaaggagtccactggccattgctggctttgtaggggaaggaaggagccgcaagccaaggaatgtgggcaacctctagaagctggaaaagacaaagaaatggattttcccttaaagcctccagaaggaatgcagccctgctgacacctcgatgttagcccagtgagatccataccagacttctgacctccagaactgtaagataataagcttttaagccactaagtttataaaaatttgtgatgaaagcaacagaaaactaatacagtagtttatttgtgcacgtttcatagtttaactcatcccttacaggtggacacttaaattggttctcatcttttgacatctcctagattttcagtcaataaatggcagagctaggacataagtctggatctcttgcctctaaatccacagctcttcctattatattatgttgcctcacaaaactttactcatttcctaagcatttactgaactcctcctgtatgataagcactttgctaatctctacaatgtggcctaaaatgaaccacatgatctttggaaggaccattgaagttccataattaaaaatcatttccacagtacctctgtcaggaggataggatataaacatctccgtcttacaagtcaacagctaagacccagaaagaatgactatgaattttgttttttatttgtgtaatgggttgggttgtggaaggcataagaatttctttcgagccccacaattactccaggagtacatccacttttgtcttaagctccatttgatgtcagccattttctttgtacttactaatagggatgtggacatatgtgcacacataagcatatgaccagcagcctccttgctatagctccaaagttcctttgataatgaagaaagaaattagacttctgagtcattcttagactctgggcagtaaagccacaaagtctggatggcaaattcacaaatgtgacatgtacttgttctcagtgtttagtaatggtgctataatctgcataaccaagctctgaaactgagcattttttatttgggggggagtttattattttataattaccctatttacattttaatgtaagaattaagaagatgctcatccttatttttaataacatttctaaatcagcctgaaactgaaattggcttcactcttcagtgtagaaaatacgtttattgaaaaatatggaaggcagatgcacagtaaacagactgcattttgcggttcttcattatccatataaaatgtaccagagttggcttcatgcattaaaattcaatatgacctagtttaagttcctgtacccccctttgtctagcttatatcatctcagtagaactaccctgttgaaaagcaaaatgctacagctttatttacacaatacacagttatgtaaatgagcaagcattaatcacaaacatttcccaaatgaacctttacaaattaacaccattaactttgccagggagcaggcattgcagtccaggaataatatgctttccaactgagtcccagacatttgcacaaatgtgtgtatcacctcaagccctgctttcttcttgaccaccttttttctaacatggtgtatctaagctgaatggggctgtctaaccctgaatgtttctttattctccagtaactgagtatactgcaactgcagtatggtcataaattgataagcctaaatctgaatcctgatcttttagctggaaaatgccatttccaaagttaagctttgccggggaaatgagctaacatacacttcagaaaattttttgagactaacatttatctcattttggctaagttgaaattggcagatcccaaataatttctaatttacatattcatttcaattccttggaggatagtagcagaaggatgaaagaaagtgattcttacacaaaatcaaatctttatacaaaattgaatcaaaatcaaattcttaaacagattcttacacaaaacagggcaacttgattctcttaaatgtttaaaaacagagattatattattattattattaatattgatctcagaacagtttattataaatacccttaatgtatttctgagtcttttatgccttataagcaaatcaaaatgaaagcatggtgatctttttagtcaagttttatatactctaagtcagaattgaccctgaaattttggtactcagcattaataccacaagtaattaagcatgagatacattgtccctaaatgttgaccccataggcttttattactcatttggagctagcccatttgatttttcaaatttacattattatctttgaataacataataaacattgaatcacttagagtttatattttattttgtatggtacctctaggtttgtgatctgttgatattttttattttgttttttggtgtcaggttatccaatatccctatctctcattttagccttctgttctttttgctgtgctctattttctcatgtctgaagacataaggtgacaacctcatgccatttcattgatttacattagaatgattaagtacaaatagacagaatattaagggtttgcttagaagttaaaatggtagggtaatcaaccacttgtataaacatttctgtgggtgacctgactgtgctactctttactataaatctctataagatttcagaaactgcagtcgttcaatgacctccctcaattcccatgtgctacagttagtgtgtaattggtacatccataataccacctcactatgcattttgtgtctgtcatctcagcagttttcatttggataaggcaatttaggttatgccctcctcggtctttctgcctatatctcttctttggttttaattttattccaatttcctggtttctttagcagttaatataatacaataccaactcatatttgtcttgcctgaacaaacttccccatctaccatctgccatttagaaggccttagtgctgtctctgctagaggcgctggcattctctgtcacccagcagagacctcagcagtcaagagattaggaaggaagccacaactttgggttccacataactccctttccacacgctattggctgattttgcatcttcctttgccaccagacctaactccacctctctccaccagctgccatgaggcagcaagtccctgcagcagctatgttttttcctgagaaatcagatcaactgggaaacaggaaccccattagacaccatgtttgaagatgtcccttgcagcaaaagcaaaagaggcacacagctgcaagggtacccacttgggttttctgaaggatcaagctttttatttgtcattatgtaacattctcctaggggattccacatttggctattgactgcctggtgcttgcttttaactctagaaattctatctgcatgttatgtttctcttcccctgtgttttcttctaaactatcacatttcttcttcctttcttctctactcaattttctcttctctctctcctccaactcttctcctttatcccttgttcctctttttctggcacaaaaatgcaacaaatgcaatttcccctgtctttcttggacatttgtaatttatttatgaagtttttttagcttaacaactggattcattgttttaaatcagaggtattttacttaaaaaggcctttagagggttaaaaaatatattgagcatgttacttgaaactcaaaccaacatactatttaaaaaataaatttaccttatattttctgaatattcagatactctgtagttgatggtagtttaccctaatgggtttgtcaaaaaaaaactttgaacattcacttttatgtatatattatacattcacctatatatatatgtatattcacatatataaacattcacctatgtacacacacatacacacatatacacattcactgcctgccacacatacacatctactgtgtttctcttgaaagcccttaagatagatagcagcttcacatatatgaacatataagatagatagcatattcacatatatgaacattcacatatatatacacacatgtatatctacacacactcactgcaggccacacatacacatcaactgcatttctcttgaaatcccttaagatagatagcagcttctttagtgtatacacttgtagcatatttatataattctagattgtatatacacaatttcatataaagtgtatgtatatgtgtgtgtatgttcaagaatactagtgactaagctattagatttcacccatgcaaatagtagcctctcatgcaaaacctaaataagccaaggaagttgaccctcacagaaaagtgaccttatgataaggggatttggagaaagtcacatataaactgaactctgcagcaggtgattaaataaagagataaccacagtagtgataatttcattgctgggttaggaaccaaaaagctagttgcaaagtttacatctgctgttcagcagtacaaattgttgaataaatgaataatactgtaagtttgaaaaaaccaactgattctgtcaagaaatataatactgaaaatagaatcaatagcatcagatggaaatctagaaaatgataacctgcttttgtcaaacattttacatttttgccataaataagactatttatattgattcttaggtttaaagagtagtgaagcagataggaggtaattaaaagcataaatctcaggaacttgggaaggtaattctctgctttgcagacagagctgacaaaatgatgaacattttttgcttcaatatgacagaattatagcatgattacagggagcagggacatattgtgctaaaagtttcattcaatagcggctgtttaacaagctcataacaaagttcagtcatcttttttgaagcatatagtagtcacttattaaatataaacttgtttccaaagcagcactataatattatttaaaaagtcacagcctttctcagcattaccttattttaaatgggtatttggataatttaggattgatattaaacttatcaatgaaaaaaaagaaaagactaggttaaatgtgaagtttaaaaaagtgattatgatggatcacgacgtcaggagatcgagaccatcctggttaacatggtgaaaccccatctctactaaaaatacaaaaaattaatctggcgtagtggtgggtgcctgtagtcccagctacttgggaggctgaggcaggagaatggcatgagcctgggaggcagggcttacagtgagcccagatcacaccactacactccagcctgagcgacagagcgagactctgtctcaaaaaaaaaaaaaaaagtgattatgatgacgcataaatgttcatcaaatcttatatttaactaacaaggaaatatacaatacacatcattcaatatttttctggcttttctttaaatacatagatgtctaacatgatatgttattttagctatttatatgtgttcaatgatattcaaagttggtgatcagcctaatatgatgttatgaaaaaaagaaaatatgaacattactaggaaagtagcaatactcaccctcacttattataatacagtctcaacagaaaatgattatccatgattcaccatcgaaattgcaagttttggtacatttccattaaatattagtttgctgatcaaacattaataacagctttgaaagtactatgggttttcttttttcctgtgtaaaattcctgtgttaataactcttttagtcaaaagtaaaagattcctggaaggatttttaagtcatttttgtcagtgacctttctcagccaaaacttgtctcgccacttgggagttggaaaaagattgttgagggtttgtgtattttccttctttacttggtatggatttctttagtgaaggtttgttgcagaatccttaacaataagatgtttcattatatatttgtggtttgggattcttcagctgaaaatttattcaacatacaattaacaacaggtagaattgctagactgaacacctgtagccttccaaaatgattagttgctggttttaagtttaaattcaggctttaagacatacttggtttgctgtagcttgtcttttattcagtatgcttgagcaggcatttggctatagtttttacagtttaagacaaaaacaaaagtgaagctgaatggaacaaaaaaaataagtttactacactgctttcaagtaagagactaatttaataccgtttagaacattctgcagaagaggtaccctttagctactttcatctctcaagcgctctttaaatgaagcgacagcattttgccctggaagccatgaactttagttgtggtgggtcagcataaagagcagttttttgggaaagtctgactggctgtaaggaactttatgatgtgtggcttggggatggggtggaggtggagacagcatatgaggaagtatcaccttagccaattttaaaatttcaagctaagaagatgttgttggcaaaatactgtagctggttaacatgagttatttaaggagagtaaaaaagcagtgaacttgaacagggagttaggagaagagagtcaaagtagttcctgccttgaaaggaagatctgagaaataccctcctatatctggttatctagctagggaaacaaaactaatacaattataaatactgctgaactgtatgatgttaatacagtaatataaatttaattataaatttagtaatggagacagcacatgggatagaataatcacacaagtggaaagctatcatttgattaatgccttctcttctgccaggccctgtactaggtattctctacatgttatccttgtatttgcacaaaggttcctggtggaggtaaactgagaaagacttgagagatggtcaggatttaaaggagagagaattgaagacataaaatattagagctaaaccagggcttgttgaggatatggcccatgaataggctgcagggggcctatgggctccctaaaactatgtaaaattttgtgtgtctgcatatctggaatgatgatcacttaagacatatgactgaatcttcccttctcacaggatgaatgttccacagcttcctttggcaacatattctaggatttaatcacttttagttattaatactccatcttacctaaatctttttttaaaaaaatgaaaagaaatctttgtctttatttctctcactttagttctgcattctagggctcatagcaaattttgggtttgctacttagaaaacatgtcaatgacaaggaccccggagaatatatgaccctgttaaggctcttactttgggggctgagaatatgattcaactcattagtttgtgcttccttcaaattagaaaatgtgttttagttctaataaataataatttccttactttatcagtggtatacctaacatatctgacactcccattgcaggtcatttttaatactccttcctctctaggaaaaaggcattttcagaaataattgtgaaattacatgactagtaacaatagccacaaaaaaactcataaactttttttaaattaaagtttgaatacagtactatgccactaaatattaccagtgcacaaaagagaaaaaggtaaacagttaatctttgtgttacattaatgtattttataaatggagaaaaatatgtatattagtccatcacagtaatgaataataccattatagtaacaaataagtgaattttaatacaatcaaaattatacaatatagagtttagataactattaattataccactgatattacattttattttcgtttatttcttatttttaaagcacataactttaaaagatgcatacatttccattttaatgctaccagccaaaatcggtaaaatattttatgtatgagctacaatttatatttaccaaataagttaatacaccttacagttgccactgtctcacttaagtctaaaacacaaaaattccaagtaatcacaaaatgaaagaattgaaattctgaagttttgtttctttgcctttaaattcactatactatcattattgatttcaaatcaactattaaatgcaagaatctgagtggcacaaggtttgcaaacttgaactgcatctgaaacaagcttgaaggattcctcaccattaggaacttatactaaatggatgtagaggagtcactgtgaattggaagttccgtcatgtaactacaagttctctgtattaacttccatgtagttaatttaaaaatttgaaaaagctctcattttagtcttacatatatattattaaaactcaactgcaatcacagcaatcatttatttaaaacttagaccaataaaaaactgtttttcagagaaaactattttattattcgttaaaactaccagtatgttatgatgataaaaagtagactgatttttggtccgtttttttattgtttttaaacaaatgcaaaccctatttcctgcacctgaagtgaactgtcccacatccctaccttccgtataccagtgacatttgttattcgattaataggaattctagttctgctttaaatacgtgttacatttagcacaggaggtacgtagtgctaacttataatcaccaaatagtttcctttttatcttcaataattctcactgaatgttctctgaaaagtaattttcattatctctcaactgtgagcttaaggtggttacccagtttttccttggaaagaaataacattctataatatgagggacagctatgaaatctttttatgtgatgatttatttttatatgtcatgaatttttttggccctttcttatatcatttgagaggaatggaaaaggctagattcactaaaggagtagttaggttgttatagttttgtaatttaaattgtttaggccaacaaaatgtcctatatacactgctaaactaaaaatactaacaatctccttttttttttatagttgctttacagtttttattacacttttaaattaagatgtaatttacatacagtaaaattcactccttttcagtatacaaaagtttgtgagattcatgaatatgagtttgacgaatgtatacagtcaagtaacctctgccacggtcaagatatagaacaatttcgtcatcctctcaaattcccctgcggccctctgtattcaaccatcctcaaatcccagattctggaaactgctgatctgttggctgttcctaaagttttgtttttgcaagaatttcatataaatggaattatacagtgatgtggtttggatctgtgtccccacccaatctcttgttgactcctaatccccagtgttgcatgtgggacctggtaggaggtgattgcatcatgggggaggatttctcatgaatggtttagcaccatcccccttggtgctgtcctcatgatactgagtgagttctcctgagatctggtttttttttttttctttaaattatactttaagttttagggtacatgtgcacaacgtgcgggtttgttacatatgtatacatgtgccatgttggtgtgctgcacccattaacttgtcatttaacattaggtatatctcctaatgctatccctcccccctctccccaccccacaacaggccctgaaaaaatgctcatcatcactggccatcagagaaatgcaaatcaaaaccactatgagataccatctcacaccagttagaatggcaatcattaaaaagtcaggaaacaacaggtgctggagaggatgtggagaaataggaacacttttacactgttggtgggactgtaaactggtgcaaccattgtggaagtcagtgtggcgattcctcagggatctagaactagaaataccatttgacccagccatcccattactggatatatacccaaaggactataaatcatgctgctataaagacacatgcacacgtatgtttattgcggcattattcacaatagcaaagacttggaaccaacccaaatgtccaacaatgatagactggattaagaaaatgtggcacatatacaccatggtttactatgcagccataaaaaatgatgagttcatgtcctttgtagggacatggatgaaattggaaatcatcattctcagtaaactatcgcaagaacaaaaaaccaaacaccacatattctcactcataggtgggaattgaacaatgagatcacatggacacaggaaggggactatcacactctggggactgtggtggggtggggagaggggggagggatagcactgggagatatacctaatgctagatgacgagttagtgggtgcagcgcaccagcatggcacatgtatacatatgtaactaacctgcacaatgtgcacatgtaccctaaaacttaaagtataaaaaaaaaaaaagaatgaaaaaaaaaaaaagaaaatgtggcacatatacaccatggaatactatgcagccataaaaaatgatgagttcatgtcctttgtagggacatggatgaagctggaaaccatcattctcagcaaactatcacaaggacaaaaaaacaaacaccgcatgttctcactcataggtgggaattgaacaatgagaacacttggacacaggaaggggaacatcacaatctctttttaagacttaaacatttacacagatagttatagaaggggatattcattaaaatctgtaaatgttgagcaaatgatgaatgtctatatttgtaaaatagaatagaattactgaatttgcagatgtagatacaaaaatataaaatttgaatatgtggaagacattctttgtaagctagctttctagagatttaaacattgaataattgtcttttgcattagttttcattttcataaatgcagtaaattcttattaaattggactacattaattagggatttgtgatcattcaggtgtaggcaaattgtacttttattggtccaaattctttcttcaaagataatgcaaatgattgtcgcaaaggaggttgaagcatagagatttagagcaccagcagaaccactttttcaatcatacttaagcacttaagggcactaattaaaacacaaacaaagatatgatacaaaataattcttaccaggcacagtggctcatgcctgtcttcccaacacttggggaagctgagacagtcagatcacttgagcccaggagttccagaccagcctaggcaacatggtaaaaccccatctctataaaaaatacaaaaattagcagagcctggcgacaagtacctgtagtcccagctacttggtaggctgaggtggggagattgctttgaccccgggaggtcaagcctgcagtgagccatgatcccaccactgcactgcagcctggttgaaacaaaagatgatggcagtttgaaccaaaattgttgtggtagagatctaaagaatcagcttgagtagataaatatttaggaggtaaaatctattggacttggtgatggattgaatgtgggggtgaaggtagaatgtggcaatgaagacactccctggatttggttccttcaacagatgcagagtgtattagtccattctcatactgctataaagacatatctgagactgggaaatttatgaagaaaagagaattaatcaactaatggttctgcaggctgtacaggcttctgcttctggggaggcctcaggaaacttacaatcatggcagaaggcaaaggggaagcaagcacgtcttcacatggatggcaggagagggaaagagaaaggggaagtgttacagactttcaaacaaccagatctcatgagaactctaacataagaacagcaaaggagaagtccgcccccaagattcaatcacctcccattaggcctctcctccaacactggaaattacaattcaacatgagatttgtgtggggacaaagagccaaaccatattattcctcccctggcctctgccaaatctcatctccttctcacatttcaaagcacaatcatgccttcccaacagtctcccaaagtcttaactcactctagcgttaattcaaaagtccaagtccatagtctcacctgagacaaggcaagtcccttccacctgtaagcctgtcaaataaaaaacaagttagttatttttaagatacagtggaagtacaggaattggataaatgctgccattccaaaatggagaaattggccaaaacaaaggggctataggcaccacccaagtccaaaacccagcagggcagtcaggatctaatgccaattttgtataatgatggcacaactttgtataatgttttgtataatgatagcacaactttggaaacaacatatatatccaccagtaagggattattgaataaattattgttcattcatataaaatttatttatttgcttttatttttattttgtgggtatatagtaggtgtataagtttatgaggtacatgagatgttttgatatgggcatgcaatgtgaaataagcacattgtggagaatggggtagctatcccctcaagcatttatcctttgagttacaaacaatacgattatacttttaagtaattttaaaatgtacaattaagttactattaactatagtcaccctatcgtgctgtcaaacactaggtcttattcattctttgtattttctttttggtacctattaaccatccctcacctctctcccagctccccgctacccttccagcctctggtaaccatccttctactctctgtgtccatgactttaattgttttaatttttagatcccacaaataagtgagaaatgtgatgtttgtctttctgtggctgccttattttacttaacataatccatccatgttgttgcaaatgactgggccttattctttttaatggctgaatagtactccattctgtatacatcccacattttcttcacccattcatcagttgatggactcttacattgctcccaaatcgtagctattgtaaagagtgctgcaacaaacataggagtgcacttatctgtatgatgtactgatttccttccttttgggtatatacccagcaatgggattgctggatcatgtggtagctcaatttttagtttttcagtaacctcccaactgttctccatagtggctgtactaatttacattcccaccaatagtgcacaagggttcccttttctctacatccttaccagcatttattgcctgtcttttggatataagccatttcaactggggtgagatgatatctcattataattttgatttgcatttctctgatgatcaatgatgttgaacaccttttcatatgcctgtttgccatttgtaagtcttcttttaagaaatgtctattcaaatcttttgcccattttttgattgggttatttgatttcttcctatagagttgtttgagatccttatgtattctagttattaatcccttgtcagataggtagtttgcagatgttttatcccattctatgggttgtctcttcactttattgattgtttcttctgtgcagaagcttaacttgatgtgatcccatttgtccatttttgctttggttgcctgtgcttgtggggtattgttcaacaaatctttgccaagaccaatgtcctggagattttccccattgttagtcttgtagcagttttatagtttgaggtcttagatttaagtctttaatccattttgatttcatttttatatatggcaagagatggggtctggtttcattcttctgcatatggataacgagttttcccaacaccatttactgaagagactcccttttccctggtgtatgttattggcacctttgttaaaaatgagttcactgtagatatctgagtttgtttctgggttctctagtctgtcacattagtctatatatctgcttgtatgccagtagcagctctgtagtatataatttgaagttagataatgtgattcctccagttttgttcttttggtgtaggatagctttggtgattctgggtcttttgtgattgcatataaatgttaggatagttttttttatttctgtgaaaaatgtgattgcaatgaatctgtagattgctttgggtagtatggacactttaacaatattaattcttccaatccatgaacatggaatatcctttcactttttgtgtcctcttcaatttttttcatcaattttacagttttctttgtaaagaattttcacttctttggttaaatcttagatatttaattttatgtgtggctattgtaaatgggattacttttttatatctttttcacattgttcactgttcacatataaaaatgctacagatttttgtatgttaattttgtatcctgcaacttgactgaattttttttatcagtcctaataggtttttatgtggagagtctttatttacaaatataagataatattatctgcaaataaggataatttgacagttttctttccaatttggaggtcctttatatccttctcttgtctgatcactctagctaggacttcaagtactatgttgaataacagtggtaacagtgggcatctttgtcatgttccagatcttagaggaaaggttttaagtttctccccattcagtataatactagccataggtctgtagtatatggcttttattattaggtgtgttccttctatcctctgttttcttagggtttttatcatgaagggatgttgaatttttcaaatgcttttttagcatcaattgaaatgatcatatagttctaatccttcatcttgttgatatgatgtatcacactgattgatttgcatatgttgaatcatccttgtatcctagggataaatcccacttgtcatgatgaatgatctttctaatgtattgtctaattcaatttcctagtattttattgaggatttttgcattgatattcatcagagatattggcacacaatttttttatgtctttgtaatgtgtaatactggccttgtagaacgagtttggagtattccctcctcttctatttttggaataatttgagtaggattaatattagttctttcaatgtttggtagaatctattagtgaagctatggggtcccaggcttttctttactggggagctttttgttacagtttctatctcattacttgttgttggtctttttaggtttgggattttttcctggttcaacattagtagttagtatgtatctaagaatttttacatttcttctagattttccaatttgttgctttatagtttcttatagtagccactaatgaccctttaactttctgcagaatcagttgtaatgtctcctttttcatttctgattttacttatttggatcttctgtctttttttcttagtatggctaaatgtttgccaattttccgtaacatttttcaaagtcaaatttttgtttcattgattttttttgtattggtttttcatgtcaattttatttatttctactctattctttttttctacaaaatgtgggtttggtctgctcttgcttctctgtttctttaagatgcatcattagattgtgtatttgaagtttttctcttttttgatgtaggcacttaaaactataaactctcttagtactgcttttgcagtatcccatggtttgggtatgttgtgtttccattatcatttgtttcaagaaactttttcatttcttcttaatttgttcattgaaccactcatcattcaggaacatattgtttaatttccatatatttgtatagtttccaaaattccttttgttatgaatttctagttttattccattgtggtcagagaaggtgctcaaaattatttcatttttttgatgttttaaggcttgttatatgagttttttaaatctgttcttgagaatgatccatgtgttgaggaaaagaatatatattctacagccattagattaaatgttctgtaaatatctaataggcccatttggtctatatgtagacttgttatatgtagtttttttgtggtctgttcttgagaatgagccatgtgttgaggaaaagaatatgtattctacagccattagattaattgttctgtaaatatctaacaggtccatttggtctatagtatagactaagtcttatgtttctttattgattttctgtctggaaagatcagcccagtgctgaaagtgggttgttgaagtctccaagtattattgtattggggcctctctctttagctctaataacatttcctttatttatctgggtgctcccatgttgggtgcatgtatattaaaatttttatattttgctgcattgacccctttatcactatatagtgaccttctttgtctcttatagtttttggcttgagatctactttttctaatataagatatagcaactcctactatttctttagtttccagtagtgtggaatatctttacatcccttaattttcaatctgtgtgtctttacaggtgaagtgtgttttttgtaggcagcagatcaatgggttttgtttcttcatccattcagccagtctgtgtcttttgattggagagttcagtgtatttacattcaatgttattgataagtaaggacttactcctgccatttttttatgtgttttctggttgttttatggtcttctcttccttccttccttctttctttcctttttgtgttcctctagtgaagtcaattttctctggtgatatgattgagtttcttcctttttatttttttgtatattcattgtattttttttttggtttgagtttaccatgaggtttgcaaatagtatcttataacctattattttaacctgaaaagaagttaactctatttgcataaacatacaagcaaaaagaaaactaataaaaaacttaatgtcttaatttatccccccactttttaactttttgttgtttctatttatatcttattgtactatgtcttgaaaagttgttgtagctgttatttttcattgattcattgcttagtctttctacttaggctaagagtagtttacataccacagttacagtgttatcttattctgtgtttttctgtgtatttactattacaagtgagttttgtaccttcacgtgattatttattgttcatcaatgtccttttctttctgacatactctctttagcatttcttacagaataggtctgatcttgatgaaatacctcagcttttgtttgtctgggaaagtctttgtttctctgtttgtttgttcatttgtttgtttttgagacagattctcactctgttgcccaggctggaatgcagtggtgtgatctcagctcactgcaacctctgcctctcaggttcaagtgattcctgagcctcagcctctcaagtagctgggattacagatttgcatcaccacacccagctgatttttgtgttttcagtagagacaaggttttgccatgttggccaggctggtctcgaacacctggcctcaagtgatccatcctcctcagcctcccaaagtgctgagattacaggcatgagccaacactcctggcctctccatcatgtttgaaggatatttttgtcagatagactattctaggataaaagatttttttccttcagttctataaatatgtcatgccactctttcctggcctttaagatttctactgaaaagtctgctggcagatgtattggagctctgttgtatgtgatttgtttattttctcttgctgcttttagaatctttatttttaacctttgggactttgattattaagtgccttgaggtagtctttttgggttaaatctacttggtgttctaaaccttcttgtacttgtatattgatatctttctctatgtttgggaagttctctgctattatgtctttgaataaactttctatccctgtctctttttctacctcccctttaaggccaataactcttagatttgccctttcgaggctatgtttttagatcctgtgggtatacttcattgtttttttaattcttttttctgttgtctcctctctccatgtattttcaaatagcccattttcaagctcactaattctttcttctgcttcatcaattctgctattaaagaactctgatgaattcttcagaatgccagttgcatttttcagctccagaatttctgcttgattccttttaattacttcagtctctttgttaaatttatctaatataattctgaattccttctctgtgttgtcttgaatttctttatgtttcctcaacacagttacaattctgtgtctgaaactgtttttctaggattggtgcctgatgtcttatttagttcatttggtgaagtcatgttttcctggatagtgttgatactaatagatgttctttgggcattgaagagttaggtatttaggtagtcttcactgcctgggcttatttgtagccgtccttcttgggaaggctttgcagatatttgaaaggacttgggtattgtgatctaagctgtaactgctttaggggcaccccaatccctataacgctgcagtgcttgcagactcatagaggtaccaccttgatggtcttggacaggatctgggaagattctctggattaccaagcagagacttgtccttttcccttaatttctcccaaacatatagggtctctctccattctaaaccacctaaagctgggggtagcatgacaagcacccgtgtggccactaccactgtgactgtgctgggtgagacctagagccagcacagcactgggtcttacccaaggcctgttgcagccactccatggctgctgcctatgtttacgcaaggccctggggactttacaataagccggtggcaaagccaaccaggcctgttttcttccctttagggcggtgaggtcccccagttcccaggtgggtccagaagtgccatctgtcagttgagtactagagtcaaaaaccttagaagtctacctggtgttctattgtattgaggctgagctggcacacaaaccacaaaatacagttcttccttcctatttccaaaagcagaggagactcacctcatagccaccaccaccttaggccatgaggggtactgccagatttctgtcaatgttcccttaaggcccaggatctcttaagtcagcttgtcatgaaggctgcctggcctgggactcaccattaaaggcagtgggctccccttctggcacaaggcaggtcccgaaatgctatccaagagtccagtcctggatctggggaccccaggagtacacgtggtgctctatccctctgtggccgtgctgatatctaaggtgcaagacaaagtcgcctttacttttccctctgtttttctcaagcagaaggaattttgccctgtagctaccacacaataataaaataaatatacacaaccactttaaaaaattagaaaactttttaattactcatatgaaatatctttaaaacctattgctaaatagaaaaggcaaagtgcagaacagcatatgtagtgtgtaggcacttgtctacaaataaaagaaagaaaaaatacacatatatgtatacatttgcttgataggcatgtaaacaatccctggcaggatacacaacaaagtgataacaactggttgctgaatctaagaggtaacttttctctgcttttttttttatacttttaactacgtaattgttttacatagatttttaaaaatacaatttaaatttaaaagaaacaaaagtaattgctagctagctgaacataaaattccatcaaaattatggatgatttatgtccaaaaattgcagatatgtgaaaaattataaatatccgttaagaaaattatgtttttgaagcctttctgattggtcagtgggatttaattttgaacccttttcatctctttcctggatgagcctcctcttctactttgcctcaccccgagcctctccactgtacacacatggttggttctccatacagcaaccaaagtgatcctttaataaatggaagccaaacaaggttgctcttctgacttaaaacacccctgtgattctgcatctactcagaataaaaatcaaaatccttacaatggatatttggtgttccctgaacctgaagtactcttctcccagatatctacctggttaactcccttacttcattcaggtctctgtgaaaatgctctctcaacagagtttccttgatacttaaaatggcacgttacaccatagtctaccccttacttgtctttatttttttatagcattatataacatgttcataggtgtatcacttatctgttaacactaatatatatataaaaatttataatttcttatctatgtccccatattagaacacaagtttcagtagacctgtattccacagcacttagaataatgcctagaatacaatatgtattcaatagatatttgttgcattgaacaatggatggacccttagtgttacattcctccttttagaatgtttttctccctctgctatatatatatgtatatatacatatatgtatacatatgtgtatatacatatatgtatacatatatgtatatacacatatgtatacatatatgtatatacgtatatgcatatgtgtatacatatatgtatatatgtgtatatgtatatgcatatgcatatacatatatgtatacgcatatgtgtatacatatgcgtatacatatatgtacgtacatatatgtatacgcatatatgtacacatacacatatgtatacgcatatatgtgcatgtacacgtatgtatacgcatatatgtacacacatatgtatacgcatatatgtacacacacgtttatacatatgtgtacacatgcatatatgtacacacatgtacacatgcatatacgtacatatatgtacacatgcatttgtgtacatatatgtatgcatacatatatgtgcgcgcgcacacaaacctacatatatatatacatgccatatacatgccatatgtacacatatacatgccatatgcctatatatggtattcacttttgttatcctctacacaagattataagctcctagaagtcacaaagcatgtcttctgaaacacctattacatgatacataataaaacagtgctaaattgagttgaattaaaacaattcacattgatgatatcatatattatatgtatgacttttgttatgactattattggtgagtagaacttttagacaatatcacacagaatcagaaagtggaaacccactagcatttgttgattctattaaaatattttagattttatcggtgaatcaaagttatagatactattattttagttttgcctccagcagaccaatctcttatatgtggaagattgacccaattaattttgaatgaaaacttctagtttaatctggcactttactacagaaacggccttagcatgactcagatgggctaagcgactactaaagatgtgttttcattattttctcttagttatattgtgttttgaaggtatctgttattagtcttcacatttacatattccacttaattttgaattataagatatcttctaggttttagtaattggtttcggttttggagtatgaattttacaaaaacctgttttgtgaaacaggttttcaaatgagtaatgataaataactaatatattaaacatatataaaatattactaatgctatttgtcaaccaattctctgagcattgaactttcaaagttactttgccactttcatctacattaaggatattgtttgtcaaacaaaaggagacacaatgtaaattctaatttcagatttattttgtattatttatgtaaatttccttaaagtggaaatcaaagtaagtgtaataccttctggactgattaaaaattaatgtgtggaagcctgggagcctaatttaaaagaccatcagaagacttgaatcagttagctatagagtcacagctttaatgcataaacttgaattatattgcattacttatcattgagtaacaaaaattgctcttatgaagcacacaatggcagtctgttttcccactgaaagatagcagtactctcaaacacattagcaacttgggatataactgtgaaaacactataaactctgaaatatcctcctttgtatgtcaaagtagctgagaattatcaactaagatttcccagtttaaaataagatgtgaattaatttgagggagatgggcaatttctatttttaaatccttttgggaaaatcataaaataattcaaaaatagtaattacaaattataatattttgtgtcatattataaaataaaagatggccaggcatggtgttgcacacctgaatctcagcgctttaggagggcaaggcagtaggatcactcgagaccaggagtttaaggccagcctgagcaatatagcaagacctcacctctccaaaaaattttttaaaaatagccaggaatggtggcatgtacctgtactcccagctacttgggaggctaaagcaggaggacagcgtgagcccaggagtctgaggttgcagcaagctatgatggcccctctgtactccaagctgggtaacagagtgagaccctgtctctaaaataaataaataagcgaatgaaaaataaaagatattatccatgtgttttattaaatctctaaaggtcagaacttctaaaagatgaggtccttatatacataattctttgagaaaattagatatttttataaattataatggttcccattatttcatatttaagattatgttagtagacagagaactcattttctcactctggtataacaaagaatatagttcatcaagtgcattattcatgaagtttgtgatttgcctcctcttatgatttgagagagtggctaaaggcatgctttgccaggtttcatttacttcatgtggcctcccttaagatgtagtgcatatactaagagtttacatatacatttgtcattaaattgactcagatattgatcccaatccagaaggtgaagtaaatatacctcttagaaattctaaaattgtaatataatttaaatggagagttaagcagtcttgctttcttaagcaagatacttcttgatgaattcttaaataaattgtgatgatgttaaattgtgacattaaataaaaatcattttattactcattacctatgttgaaaaattcatataaaactacttccattaggtttgtgagagaaaaatctttttaaaaataaaatgtctataatttacagtattcattcatagaattaaggaactaatcatctgagattaactttaccttggtatatatataataaacttatttataaaagaagatgatttttcattatggcctgatttgaaatacaggagagaactagaggagagagagagcacagaattgaacaaatggaaagatttgtgttcagatcacagttgatacagccaagcttaaataattgtctctcttatgcgctgtgctactcaaccccaaactagtaacatatagcatcagtgaatatctaggggaagaaatgtagattgctgggaatcatctaaattaataatctgccttccagtaattgaaagtgaaatataaaacttactgggaaaatgagacaaaattttattcacttgaaactccattgtaagaaatgattttattttttaaaagcacttttttttttttactatattccagctgatttttaactcaaactgcagcacctttctaattcatcatgtaaattctgttgtagttatttggtccatttataacttctccatgtttctgtgtgtaagtaattccaccaatgagtcatgggcaagaaacatgagcatcaagactgttggctgatgaataaacacatttgaaaaattaatttcaagccctctaaagatctcagcattttaagaagtgaattttgcctacattgaagttttctgataatgtgattgaacatatatatgtgtgtgtgtgtgtgtgtgtgtttgtgtgtgtaatgctcatatattcaaatagtggtatttcaaagcagccataacacaagaattgtaattctatcttataatattgttagaatctaaattgggcccaaaaagaattagcagtctagagtacacatcattttcttcttagaaagcaaccactttcactttagtaacatagaaatatttggagttgatgggtttatttacatctatattataaagccaataaatatagaatgtcataggtacaactctggcctggcacaatccagaagatactacgaatgttgaaatatatgtgaatagtgccctgcagagttatgcagtgtgatggccctagacaggccatagcaacttgtagcgtttcactagctataaattagcaattagcaaagacattatacctttttaagctaaaaagctcataatagttataattttgtctggactttgttttcaacaatcccaatagatgagaattgaatgaagtgaatatcaaagccaatagtatgtcattactgatattgcaggccttacaattgcaaatatcagcagaaaaacttactagcaacctttggatatgtaagcctttctcttgggtatagctcatgcttcctatattgtagctttgtctctgagagtgtgtgatcttatgaatgccagaaatatatgcagaaagcattgtaatagtaaaaacagttttatcttgaaacagtgactcaagtaattatttatttctcagaaaactttagtttcttagtatgtttaactatagcattttaagtgccttgcttttatctcaaataattattaaagcttcaatataaataacttaattaatttaatgtaagattatggtttggagcagaggataaaatctgtgatgtaagagcagcatcttacatcctaatcattttctatacaaaatgcctacaaatagaatatttgatttttaattgaaaacactatggtatgtttttgtggtacagggaaccattttcaaggtagcacaacgtagcaacctttccctgtttttcccttaatatgtctattctagtgaaactgaaaagtgtatgtgcccaggaaacactgtataatacacaggactcagtgccctagcacatgttgttccctttgcccgtaataccttcatctccattctgccacttcggagcccggcccttgcagcagaacccagctctgataccctcttttcatggagcttccttgatttcctcaatctgaagagatttacctctctcctgattctcatattctttgtttcttggtacctcccattttataattctgccttctgctttggattatagttatttgtatgcttgtcttttcttccaaccaccattctggcaagtaggggtctttgtttttaatcgtttacaatatctagcccatggcaggtactaaataattttttgcagaataaatcatcaggtttcccctttgttagtttagcctgttttatggtcgctcatttgacatatgttttatttggcattttagtatattgggttttcctgaaaattagctgacctttgctatttcccttataacactgcttaacacattgaaatctaaggtctcaggaaaaaaacagatgccagtagttttaattatgcactttctttaattaagggaacagttctaattactttttaaaatgcaaaaaaaggttggttctattggtaaatatataggtaagtactttctccagggccattgtctttccccagtcactttgtgagtttttccttcgactgttttttccatgcaaagtgagcacagtttaatgtcctcattcaagattctagccatgtctctgaagtccaaattagaaataaggtaaaaatcaggccgtgcgcagtggctctcgcctgtaatcccagcactttgggagaccgaggcgggcggatcacgaggtcaggagatagagaccagcctggccaacagggtgaaaccccttctctactaaaatacaaaaaaattagccgggcgtggtggcacatgcctgtagtcccagctactcaggaggctgaagcaggggaatcacttgaacccgggaggtggaggttgcagtaaggctgagattgcaccactgcactccagcctggcaacagagtgaggctccgtctcaaaaaaaaaagaaaagaaaagaaataagtaaggtaaaaatcagaaatgagagcacagtgaagtttagaagtttttgggttacatttttgtttttgaagcactaagttatctcattctttatcttttttgtttgcaacaatggggttctaagaaattcagaggatttgagaaagtgaagagctttagcaacaaaggttattaatggaagaaaacattccaagttgtcatttcctatcaaagctgttcttctttcagtgggtgtcaggtaattaccagagtggccttcagagaagaacctatatgctgatgaattcttatgtgaaggtcagtgtagtggtttgggcgactctttctaattctggcaattcttgtgaagaggtttctttggtcactgccagttaggggcacagcagcactttaggaggggaagcagaatgcaagccattactgctagacaagcatgtgtctgctaattactcattgggtataaagtaagtcagcttggccaacctagtctcttagaagtgtcacaagagccattgttgatgggcttgacgtgtgttgcctagttcatgggttttctggctcctgtccttgtttctttcactcctcaattaagaagattcctagataatgaagtcaggttaatcttttgctacttaacagtgtctcagtttcacttgaagatttgcccagcatttagaaactgttgacactgcctcagacacagtactagggatagcaaagtgccactactaagaataccacaggagaatgggaaagatgccaaatataaggaagtggcacttgccattctgtctttatttcacagtcttccactccatttttcccaaacaacagtcaataaaagctaaaaagccttgttgcacttctctccctgaccctgaactcgaagcagaagtggatcatggctatggagagttttttccatcttggccagtgaagtgtcacttagctggatcctcatcccaagtgttaattgacgctgttaactttcggcactgatgccaagaaatagtaatgaggaaatgacactgtttatcttgtacttggaggttttatttagagaaccatatgtttctttagccaaagggcactaaagtaacgctgcactatttagtgtactgtgaaagatgagtttttagcaggtcttatgatacgttgtagaaattgttgtatatttaaaaagttgaacttttttttgttttttgttttttgttttttttgagacggagtctcattctgttgcccgggccagagtgcagtggcacaatcagggctcactacagcctcgacttcccaggctcaagtgatccacccacctcctccccacaagaagttgggactacaggcatgtgccatcatgttcagctaatttttttgaattttggtagaaacaaggtctcgtaatgttgcctaggctgatcccaaactcccaagctcaggcgatactccttcctgggcctcccaaagtgccgggcttacaggcactgcacctggcctaaaagtggaactttctttactcaacagaaggatcagacctggtgtttaatattagcatatttcccatgaattaagtacgtatttcctactcatagaaatttctataggattaagttataatccttctctgagtcattaaaagcagcatgctatctttgtgtatattttttacttctaataaaattataacattaacttagtgtaggtatgtatatgtataatgtgggtatataattaaatagggatatgcttgtaagcattttatatctaccatggcttctccacccacctgtgtggctttttataagttatttaacttctctattcccagtttcccgtttgtaaagtgctggccaataatgcctatttcataggatattataaggattaaatgatctaaaatatgtaatgcatttagaattgtgcctgaaagagtaagctcagtaatattaatcattattatattattatactacattatcaatttttaatttttatttgcatattttcttaatgtataactaccaaactatattagttggattcaaacattcttggttggtaataaataaaggccctaaaataatgttacacttttctccccacgtgattatttttttttccaacttgacagagaacaacatgagaagtccttgagcaaaccaagtaagagcaatgccaagtcaatgaagatctaaaaagatatgtatgaaaagatattcaggaagttagggaccatgtatagtcagtaaaaggctatagaccttgggtgacctgggttatatgctagggaaatcactaatatgtccaaaacctatccttagattacactactaccaaagcaatatttttttccccagccacctcccgccctacaagaaataacacagcagaatcaaggtacactgaaaaacagactgtggcatgaatctatcaccaagcttccatttaaatgggagagcaaatatatagatatgatgtttaactcactgcatgacccttaacacttgtgactatatcatctataatatttggcatgaataaattcatcatcatcatttataagcttaggataaagtaggcctatcacccaccaagatctggaagtaatgctggcattgaagtggtgctcaccatcaccagttctgctgaactagctatggctggatgtctgaagatagcaaagcaacatgtcctggtaagctggagtgaaacaagcaggaaagtcagaagaaacacttcaacaacacacaataatcaaccttagatggcttaatctaatcatggcatgttaaaagagtgctttgtctctagtagttagtagtgaaatggttccacttaagcaaagggcagaaggaggattgataataaccaaggcttcaagcaatcaatgatattattataaaagggactttattatagtcatactctccactaatgatcttaccagaagaatcatatattctttctgctgccttcctttctgtgtcatctcttttctctcatattcaatccaacaaacatgtaataaatagctgttgcagaagtcttccccatttggaatttgtgtgtatcatcaggcctctgcttgagaatctcacctcagtggtgaccttctctacataactacacatctagtttccttaacctcatgttgatgatgttccaccaagaggcctatgtaagcacttctccagctatagccctcactgttccggcactctagcgtcagtactttccttaggcctgcatcctccaactagaaacgtactctttgctactagtgtatatgcatccctttcctcaaatctcaaatcaaaagttacccatttaggaagtcttcattaataccactcccctctggtccatttttttgttgtcctgtatctcccatagcatgcatctttcgctgttttagcttacccttgtatatggatagctctccattgaacttcttacctcatgtatgtgtgaaacctcattggaccctaaagacagagacccattctgtctgtccaactatcgcttccaactaccaacctacacacacacttatcacctgtattctgcttgttgaggagaatgagtggaaaggttcatttaatcctcttcaaacacatacaagtatataaagaaaactgatggtttttaaagttattatttctttagaaatcctctaacaaaagttcatcttgctttgcataagatttgtcatccatttcactttataactaagctaatataccatttatgtttagttttgtttcttttcactaaatacatgtttatgttttttcagagtcttttcaaaattcaattcaagtgaatatatttagattattttgttaatgtatatattaatactagatgccaataagagaaaagccttgttgtttaggcagaggaaaattttccaaatgtcagtaagttgattaaatgttttcaaggcttgttgtaatttgtttttgtgttttgtcttgctctttctttttccttttgatctagtactgaagttagagttctacatatgctttgtgtataaatgaatttaacactaacaacttaggcttcagaatcacatctgagatcagaaacaagggttttttcctacctcctttgtggcttacattatctgttcttgtaactggaatcatcaaaatggtacatgaagtgcatgtagagcttaccaaaaaattcagtgtcattttcactcagtagcacctattaacatgttttatcacaccagttggtctcagagcagagcccagaagaaagtagacacgtggcaaacaggattttagttgaagggaaatgactgtggaaggtcatacccacaggcatgggtaggacactcaaagcccctgctgccagccaatgtttgaaaagtagccccaatgggcactggtgggagggcactgatgacaaagctcacctgtgtcacagttttgccctaatccttttgtccactcatataatgtctggttttttaaagatgcaggtcctttgtattgtataggaggttttgatatgctacaccctcttaggaactggtctaccatttcatgaagtgccaaaaacatagtcaggtactgagttgtaaatgtctgtggtgcctatgatagaatgtatttttctcctgcatgatcatccactgtggtgtttgtaattagcaaaaaaatgagcctgatttgttctcctttgtagagccaggccgaggcccactacaaaggaagtaaacatgccaagaaggtcaaagcactagacgcaacgaaaaataaacccaaaatggttccttccaaggacagcgcaaaggctaatcccagctgctccatcactccaatcacaggcaacaactctgacaaatcaggtcaatgacactttttgttctttacattctttgtgtttctcctgttcccctgccctgaccccgttttcctgccctcagttgttgcatgttactctccatgatttgtttttgtgatattaatatgttttcttcacgggaaggattatatgtttgcacagaatctaagcatttgatatgtttccattccatgttattaaatatatacgtttaagtatatatgtgtatatgtaaatatatatatatataagtatatatgcatgaaaacaagtagagactacttgatcacaatgtgttcagactaaaatcaggaaatggatctaaaatactgagcttattacttctttctatttattttatgtgtgttttttactatagacttttttattgaaggactccttaaacttgtttactaatagatatttttatgttctcttactgtagtaaaaaggagttgaggagccaaaggggggaactttctgagagagtagcattactaaatgaatctggaaatgtgcttagtaataaaagatgatgctttttgaagatcttcagagttcccctcagagttacaaatggacttacatattttaagggaatgatttccaacgttacaaactgattaacagaagacctttatatataaatggaaatggattactaggtgaaatgcctctgaagaagagtctatatttcatagtcccagtgaatcggcagaatttctgagtaggttcattcagtggaaagagaaaaaaaattcatttttgtagcatggataccatgaaattggatgtttaataggcttccacaattctcacatctgcccctctgggcccatgacggatatgtcatcttgtttcagtgactctttgaggaacagtgtctgttaaaggagactgagagaatatgtccctttttcttatgtttgatgttctctttaggggcctccctcttgtgggaaacacacacatttctgattcttttctacttctcaaatcattggagaatttttgaaggagacttaagactgctttcccgtggcttttggagatgatcaaatccattactgtaagaggaaggttcagaaaatctgttcaaacaaagagactatggaaaaagggaccattattgattaggccctgtagatgctggctccaaaagctcttcagcgtagaaggattgagctaagctaaatttggtaataaagactttttgttctttgtacaataggatcactaaatcatgttatctgatgaacagatatagtcataaatgccagattattacatagtatgtctccctctgtaaagaacaaaaccttctgacatatattatctaattagtctttaatcaatatctatcaggtataatatcaaatattatctctatttttcaaaattgcaaactggtgaggtacacaatgtggcagttatttgctggaggctacccaatgtttggaagagcaggagcctgctgacttcttgcctggtttcgtttaatgcaggatatcactgcctttatggaataatactctgcaaaaggttttgttatctaaattatgctctttaccttccagcaaaacatataagtaaaatgataaaacaatggaggttagtgccactctattctttcagctaatagaacagttggtaggtaccatacatgttacaacgttgctactgagtgaactcagtgttccacttaagttatattattatttgaaaattgggttggctgtagggataatagtaaaagtaataagcagaaaatagtgtcaaaatcagaaatagagatggaacaatcagagaagaatccattttttaaaaaagcagataattaaagggagaaggaaaggtgtggaagaagagaaaaaaatagaaaaaaaaaagtcaaagatgaggagataaaaccaagcaaagagcaatacggaaatagaaaatcgaaataaaggggcccggattatagttacagcatgccttatacctatgagatgaccaatttcaatgagtatattttgaaataaagtttaaggattcaaggctttcattccaatactcaaatgttagcgggtgctcagtaaaacaaagacactttctaagcagttgtgtttgcctacagagcatttggaaaacaccaggataaagcataccagtggtgtgaacaaggaacgagaattaagatctaaaacccaggagagaggaaaacaaatctcaaccacagcatctcttcttcagtacctatgtggtggtctttcttcctgcattctctgcttcctctgccactcttttacccacctcctagtacctgtagtctaacagtattgatgtcactcactttgtgactacagatttggactagaagtaatagaaaccacctatatttggaggttatctcatttttcatgtttccttactcaaaatctgtataaattatttggtaactcatttgctgggccattactttttgtttctctgtgtttggtataagtattaatactaacaaaatattgtatttgttctattatacttataaaagctacaccaaagtcattgaaagatggcacttaaaaaaaaaaaaggagtgcatttgctaaatagatacatgttcttttgtcaccatcaaccatatgtcagcttctaagcaagaattcccacatgagttttatggaattttcaagttggaaaattaaaagctttgcccagatgggaaatctggtccaaacaacgtaatacctaatgtattgttaattgcctgtttctaaattcttgaaaagctcccacagctttgtcagagtcatagatttttgttgatatctggctttcatttcatttaaaatcctgttttagaaaaacacaagacacaaaaatcagtgcttcacaaaaggtctaggtaaaatgtaaggagaaagaaggtgggaagaggaatggtgactgtgataattgactgaaatgttttatttcagacaatgttgctttaaggagtcagacaaaaattagagtaaaagtcacagtgaaaattcatggctcacttgcaaatctcatgggactgaaattccccagcattggtctttttcttctgaatgaagagttcctgtcaagtgggcttaagtagtatctgtgattctcagatatttaaatgaaaagtgaaaatgttactcacgtgatgtttcagctgccagatttcaactatgcaggcactcacaacatccataggcttgactaattccatttccattctcgcgttttagcatcagtagctgagcagcagagttttgtttacattttgaaagagagggaatagccaggagttaacagagggagcttctgggagagcagcattctgggaacatcctttaaggcaaggtgtgatttcagggtattcaacaagaaacttgtgacccacagatgaacttttttatttatttatttatttttttgagacagagtctcgctctgttgcccaggctggagtgtagtggtgtcatcttggctcactgcaaactctacctcccacattcaagcaattctcatgcctcagcctccgaggagctgggattacaggtgcccaccactaagccaggctaatttttgtatttttagtagagttggggtttcaccatcttggccaggctggtcttcaactcctgacctcaagtgatccgcctgccacggcctcctaaaatgctgggattacaggtatgtgctactgtgcccagctggtgaactctttctgctcctcgagagcacacattatttattctaagaagtaatctaaaaggcttccaagagctaaggaagccctcttacctgctattttggcacttggcacaaccatttttctcttttatgttacttttggagacataatttggttcatgttgtatccagatctgtacaatgcaaagagatttgttataatggagctattgtgtataaaaatttcgggatatcatggcaagctttcttttttttctttcaggtcagtaaacaaaatgggtttaaactataatagcatgaattgcatttatcataagaagttctaactacatgattcaaaaaattagatatatttcattaaagctattcttcagttatgcaaaatagctgtccattcactttttggaagttgaggtagagttacatgtaaaatccaaataaatggctttatagtctcccaggatctgtcccaacttttaatgatgcatcagaggaagttggaaacataatgggagggaggaaaaatatgctttgggagaattggggtcaaaacacagcaagcattaggcagcttcaggaagatggctagaacatattggccagacactctacccaaatttccccctggagttcaagtgtcataatgccatatgacaatacacttccctgtgataatatgcccaatacatcaaattgaaggctctcttgtgacagcatttaacaactcacaccaggttaaaaaaatacagagcctccagaaaaatcctgtttcttaaaaataataaaatgttatgagagtcaacctaatagtccatatgtctgggctttcgcattggattttttaaaaaaattaattagatatcaatatgaggaaatgacatttctagtttaaagtatgtaaagctacttagagctaaacagcctttaatcagttgctgtctaaacagatgaatgcatatagaatgattcgaaatgccacagatgtatttataaatgcaattaagagcaaagataattgagccagcatcttctgttgaaatataacaatagaaacaccttaaatttgttcagcttacaagacgcagttacatatatgttttcacttgactttcttaaccctttgatggatagggctgaaattagtatccattgtttgttcattcatgcaacgaacttgatatccatttattcactcaacaaatattgattatctatactaaatagcatagtacatatgggtgcaacagtgaacagaaggacatttgtcgccctcaaaaactttcaacctagtgatgttttttattgtcattgttggatatatcggatttaaagagaaataatatgtagtcatcaccttcaagctgctcccaaaactatagtaacaatgaagaacctgggttatgggaaggttaggtggtttatgtcaggttgcacaactcaaatcccagtagagtcaggatggaaacttggggtttcttgtttcacgcttgtttcattattccaattacttctaaacttctgtgacttggaggagtaaatgcacgtattccaatgggcaaaggaagaaaccactaaccattttctaaataattgatgagtaggaccatatatgacttttaaatttcttgctgaccgttttggtataagctgtggcagtgaagggaccatcaaggctttgtttcattgataatccttaatttctatgcgggacattatctgtagtgtttcagtgtagtagaagaaaagttttagaagttacaaatttcttcaagaacaaatttgaataacagcactcattttaggtaaatggcaaatgataaatattctcaaagttcctgcttgacagttacagactttacatgtctagagccaaatgtactcactgaaatagaggctaacactgagacagggcattgcagcatgttagaaggcatgccctgcctccaaaggggtactcttgagctctcttgaacacgctccccattttcaatgcattttgaatcattttacctaaaatatttccactgagggcagggagatagttttatttatcccacacccatgccctatggagaccgtgaggtaacagtgttagaaaagacatgagaagaagagaaagaagataagacaccttgaagcagctcattttagttttcagtatattgtgcttttgcatggtggcagttcttcaggtgtaaacccagagtcgttatcaatgagtatatcagtatgatttgcctcaaaagcagcagtttagctttttgtggtcaccctgttgccatatgaaagtgcattttcaattttgtctaaggtttttccaccatagatacaaatggagaccctcgcctcatcatttttatgggttcccctgtgtacttcatagtttttatgtgttgttacaaatggggccaagttttccaattgacaatttctcatttctgttgactgccacaggactccatcagttagccagcaaggtcttcttagctgcctcctcacccttatctgcctctagtaacaggaccttgtgatgttgaatggaagaaaaatagttttctgctttggcagcatctgtcatttatagaaaagcaccctcataaatttggcatacatctatctaaatccgagaggccaaaatttcatatccttcataaaataatagattaacaatatttataacatcttaagtctgaagttctggggtatagtcatgtagaacataaatgagtcccatctgtctaaagagaacagaccattattctaaagctcatattttcatgaaatacacatatatcattatgactttcaaggtcaacttaaaaaaatagaactgcctccatctttacccatgcaccttgaatttgacagtagcatccctccaggtaaggctgaagattcttagtagttaaatgtttgtcatcctctgggaactaacttctgaaactttacagcattttatattgctttcaaataatgctgaacatttactgtcagtttcttcacttttgaaagctattttttagtgttggtctaagaaaagtgaaccaaaagttgaggctgatttgtgatttactgagtgtctgttaacttaggatttactgaggatacattaaaaaccactccaaaaagcaaagccttaaattacttgttgttaaagcttatatcactattaaaaacttttttcaccctcattcgaatttattttaactagtatttatctctttttattacatttatatacaactttccttccttaaaaagatattggaatataaaaggattttgtatgtacattgaataattctgtaaatgtataaccataaatgcccttgagatttcaacaaaggttattacttacatttttatgacactctacttacttgcttcaggaagaattctcttacatgacatatttttctgacacaggtggatgatcaaatagagctcctcaataaatacgtgtatattctgtgtgcgaggcacatgtggcaggcattttgggggattctgggtccgctttttttttttttttttttttttttgagacagaggctcactctgttgcccaggctggagtgcagtggcatgatcttggctcactgcaaactctgcctcccaaattcaagtgattctcctgcctctgcctcccaagtagctgggattacaagtgtgccccaccatgtccagctagtttttgtatttttagtagagacagggtttacccatgttagccaggctggtctcgaactcctgacctcaagtgatctgcccacctcagcctcccaaagtgctttagactttcgacatgtttcagtgaaaaacactttaagccttatagtataatgcttaaagtgtttttcaatgaaacatgtgtaaagtctgttcctcttccctgactctttccttgaggctcaggttccctgttgtgaacacagggcataatattatgcagtaatggattggtgctctcatttctatagaccagcactgtctaataaaacattgtgtgggccaggcatggtggctcacgcctgtaatcccagcactttggaaggctgaggcggatggatcacaaggtcaggagttcaagaccagcctggccaatgtggtgaaaccctgtctttactaaaaatacaaaaattagctgggcatggtggcgggcgcctgtagtcccagctactcaggaggctgaggcaggagaatcgctcaaaccctaggaggtggaggttgcagtgagccgagttcgcaccactgcactccagcctgggtaacagagcgagattctgtcaaaaaaaaaaaaaaaaaaattgtgcgataatggaaatggtctataatctgtgttgtccagcatggctatgactaacagcatgtaacagcatgtgactttttagcacttgaaatgtgcctcatgttactgagaaagtcaatatttcattgtatttcatttcaattaattctaagtagccgcataaggctagtggctaccatattgtacaacataactctactctttgatactccttgctcttttaactagctgtgattccagagaagttactcaattctctgagcccctcttttctaatctgtaaagtggaaataatgccctctctacttcacagcagtagggagtatggatatgttgtatggatcaaatgaaatgattgtaaaagaggtttacaaaacatagattttaacagaaatgcctgttattgatgttctcgcagattttttttccttccttttcctgtgatgcttattttagctacccttctttctgttttttgcaaaagatgacagcgacaccttgtagtggtcagctatcatcatctttcattatgcagcacctaatatcctatattctagaaaagtagatccaagtttgttagacttatatgcaaaaaataattttaatagcaatactaataataacatgtaactgaatgagcattgtgtgctttatagcatgctaaatattttatatgtactatcttatttaatgattataatagtattctgatggatattagaaagtgacacccagagaggggaaaacaatggcccagagttattcagatagaaagtattaggttaatgcaaaagtaatcatggtttttgccattaaaagtaatgttaagtaacatactaattatgttactactatgtaaagatagtaatttttgccattaaaagtaatggcaaaaacctcaattacttttgcaccaaccaaatattttcaatgccagagtctcactcgggctgtccatcaaacttactaccattatacatatactcactacatctggatgaaggtttgtgaacttacacttactgcttatgctttttgaaggctgtttgagatttatttactagatgacacttctggaagtctgacatcccagaaatgtgtgtttctttccctaccctattttacaactgtttttttttttaaatcaaattgtgagaggccttatataaagctatattaatgaaggtatgattcccgagtgccatttacctactttacatccatagcatagtagaatgagcatgagcttgaagtcggacagattagctctgcctctcactgaactcatataaccttgactaagtcatgctcatggagcttctgtttcttcatctgtaaagtgggggtgccacatatacaccatggaatactatgcagccataaaaaagaatgagttcacatcctttgcagggacatggatgaaggtggaaaccatcattctcagcaaactaacacaggaacagaaaaccaaacaccgcatcttctcactcataagtgggagttcaacaacgagaacacacacatggtcacagggagggaaacatcacacactggggcctgtcagagggtaggggcaatggggggggatgacattaggagaaatatctaatgtagatgatgggttgataggtgcagcaaaccaccatggcacaggtatacctatgtaacaaacctgcacgttctgcacgtgtatcccagaacttaaagcataattttttttcagaaatgggagtgctaatacctacctcctaggattgttgtaaggattaatgaactaatacatggaagctgcctggctcaatgcctgtcatgccacagacactcagtaaattggtagccataaaaagtaaccatttgttcaaagaaatttccaggtcctgcctatattttgactctatgatcgtttcatgacatgctggcatgcaacagtgacctgcacttacattcctctttatgtacttgttttcttgcctcatagtaattatttgcacttgtggtttcatttcaggatattaaggtttcatgagcctgactttttcagtgacacatttaaagatgcggaagggccttcttggtcttcctcacctttatatgaaatggtggagatgtctttctatccttccactggttaatgtgtctcgtctgttatgtcccctgcagcccctggcactctattctttcatagtagtaacataattagcacatattaagtgaatatcattaagtggcatgcaagagggaagctctggtgccctccctagaatatggacagaggaagaagacactgtcttagctctttttctttgttttcattaaggtggatgcccacctcacaggttgacaggttgctgtatgtacagccatagtattgaaagaacgatctaacacatccccatctgtggaaagagaatactggatgccacatgtggggaagcagccctgcctggagacagggttggctactgagatccaaaaggctagggagggggggtatgatccaaatgagaagcacacccctgcctgaaaagtccctgctgaatttatgtcagtaaaaaagcagaaacttgtcagcccgtatatttgacttccagcttttgcaaaacactttccttggtaaacaattttttggtaatccttgtcggctattaattacttagcttctaaaaaatacatgcttgtttcctttgaatataaaatatcaaacactagaagttcttaccacagtagagattatcttattcgttgctttgaaatatatgaacttctatcagtgtcttatgatttttgcccatttaacaagcaaaatggccatatccacattaaaaataatttgtcttccctagcacaatatcattgttcttagttccctgttaaaaagtaaaataattctactcaatttggaaattaattcatatactgcatttttagattaggaaaagttatttgcttatttcttttcagccaaaattttacccaatcctttgactaacctgtaggacatatgattaatatccaatagaagttttgtaagtactttgaaaaatcattagcagctgtcctgcttatatcacttacagtatttttaaattgagagaacccttttggaaggcaacttcatagaataaatcaagaaccataatgatgtgtattccattagaccagttaattcctcttcccggattctataccaaggtaataatcctaaatacaaagcaagaaaaataaaatattatgcattaagatgcctaatgtagcattcgtatcaatgaaaaatggaaacaagattattagtactaggggaattacttaaagtactagtattatgcagctttaaagtaaataaaagaagcaacatagaaaaagcaagtaacatattagggcagaatgaaatgacgggcacagacacagaggttcttaacctctgtttgtgccatggatgcctgtggctggctagtgaagcctattctcaaactataaaatctataaaatgaaatttacagcttttcaaagaaaatgaattctattgaaatccaattgtcagtttttagttatgatatagtaatatagcaataatgcattaaataagatttatcagtgggtctaatatctactgtaattttgaagtggtgaagagtataaatatttcaagcattctatgacaactgtaatgtctgatgagaatatctgatttgtgttggtgacaaagttacaggtactgctaggactactatagtttgtcaccctcaagtataattgaagaaagtgctaaatttccattgagaaaaaaagaaaataaaaatgtgtttttagccatccaagttattggatcccttgaattcatgggcctcttggaagtccacagagcccagtttgaaaactcctgtttagtgtgacaagattatgagttatttttctctattctccatgtgaagttatttttataataacttctaatgtcttgatgaggtatgtatcatggggcaaaggtaggataggcaagaaactcttagtcatttatgttatgttattgtgagtttcatagtttgcaatgcaacgtcatatctatttcttgcccaattctttatggtcacaattgcaaagccataaatctccatataacaacgttcctaagagacctagcatgataacaaacccctaagcccccttgaggaaccagccctcttaaaataatatcattttaaggcttttaactgctcaagatgatttttggagctatgtatgacatgaactccaaaattcctgtcctctgggtggcaaagaccaagagaaagtactaccatatggttacaagtcaagctctcaaggacataaaacaagaggagagggaaacctcatccagtttgtttgtttgtttgtttgtttcagggacatacagcaaagtttgtaactgaccagcttgctgggctggcttgaacagcaggcttacaggggtcctagatccacattttattctagggtaccttttttatgacagaacaaagcagaaagataaattcatacggtaaagcacatcagatttgctacaggctaacactagcctcacaaatcctttttcccatgaatcaaaactttacaggagacaaacagtgatttttaccattccttcaaccagtttgcacagagagagaggctagaaggctgactggtaagaaattctcacctttcaccagcatgctaggtttctgggttccttctccctgagtggccctagcgaccctgcttcttgcaccatagcccgggggggccaaaccatatcacaaaggaaaatcatcttttttcagtttcatgggaccataggcaaaaaatcctctcagttttgcaagatgcggcccaacaggctgcacggaggaagtggattaacattttcttttccagccagagcaaaatatgcatgacaaaacatagacattagccactccacttagcacccaatatcaaactggcaaggttaaaacttgccctggttgatgcctgtcatccttaatccattcaaagtgggatggaatgacctcagactagaagtttcaacatgtggtctctgtacaagatggaagagcagacagtgtccccaagtaacagaaaagacagaacagggaaaggagagaaagtgagagaaaagcatggcctgcggtggggtagggaaggcaaggaattcagggaggccagggaaagacccacagatcccaacgacactgagtcaaaagttcaggcggccgcttgtcagttgcaaaggaatctcttccagcagtcccatcagccatcaagtttcccccattggggagaaaaaagctgcccatgtcttatgatctgtacatgcctaatccagtcacccacagctgacagcgaagggcacaaggcagattaatctaaagagaatagtggttaacagctcatagcgccaagtccatttttaatcaaagagagactttactgaggtgggcctttaaccccttaacattttagaaaggactctacccttcctaagttgggcctcaaacccaagttcggtcaagcatccttgttttttactaagaagggcctttaaccttctctgtattaggagggactctaactctcctaaattggacctctaacccaatcccatccttttcctgggtaaaatgtaccccaccacttacccaaagtcggccaatttgtgctttgctgatgattttcctttgggtcagggatctcttaatagtgtagtcccttcgtggtttgccaggaagatattaccagaaaggggtcctgatccagaccccaagagagagttcttagacctcacacaagaaagaattcggggcaagtccatagaacaagcttgtccaacccacagcccacaggccacatgcagcccaagactttgaatgcaatccaacacgaatttgtaaactttcttaaaacattatgagatttttttgcgatttaatttttttagtttatcagctatcgttagtgttagtataacttatgtgtggcccaagacaattcttcttcttccagtgtggcccagggaagcccaaagatgggacaacactgccttagaaaaaagtgaaagcaagtttattaagaaagaagcaaaaagaatggctactccataggcagagcagagcagcttgataccactttttaaaggagacttcctatggccaacagactttctcctgtaacctctaggtcttaaatataaagcccgctttaacaacgttgtaataaggctgcagattgaatttaaatacattagaatttttttataattggcttttagaaatatatttttaaaggattggtatctttcttatgcctgggcagtccaacccctgaatgtccacatagtctcctttgagcaggcagtaagtacgtaggtccataaagagtaagaacctggtacctgagtccctgaagcagcctgaggcaaaaagcttgtctcctggaagtttccctgactagatgaagaaagactcagtttcctccctagctctcaggctgacttttccattgccagtgtccacctcatcctgcctgaagtatcaaagctaaaaccctttgctgttttctgaatctagagaggaaagagggtgaggagacccgaattcaaatgttttacttgtaccttgtgaatctgtttcctctataaagagccattcatttcaaagaaaaagaaccttttctcatttcacctagaaaattagtttttaatcttactcccagcttttgaatctctactgaacctactccctgaggaatttgatttgagcgacatgagttactcattctattttccataataaagctgcctcagaaataactgtttcacatctcttggtgacaaattggaaaaggggcagtttttcaacccggagaagttgaaatatgatttctctattctgcaagtcaaatggctggaaaaactacacaaaataagagaaagctgttcattagattcaaactctagtaaacaagcccttttttatgctcactcagaaaagctgacaagttcactaacatcggtgccagttcactgatacagaaggtaggctgccagctttcaacatggagatagttggagatgccattgttttatctgagtgtgaggctggcagcttgtgcttccaaagtggcacaaggtacaacagggtagttgtcatatgatgcttagacaaggagggcaatggctgactttctattgaaccacagaatctctgcaggccatgaaccaatggccagaacctgattgatagaggctttcaaatggaaagagcagtgacatcctaagtcaggattgtagcctggcagagaattaccagaagatgtgagtatgatgcagggctggttttagacttttgaagttcactgcctaacttttatgggtcctaagttacttaaaatgaatatgctttttattttgttgtttttttttttctaaaggacatgcagattctgattcagtgaagagtcactttatagacaattttccctgctttcaggattagtctaaaagtcaagatatgaaaattagacataaatgtagctaattaggatttagcaagcttcacagtcatgaaccatgcttgaagagagagggtttctggaatttagctacaggcatgataatgtgggcactggataagaagggcctgactgccttagattgacccaatgtgtaatattataatgctcggagaatttcaaaaactagctttaagttccatgtctgtccttggctactcagtatttctgggcttatgacttaagtattctgttttgttttccacttctacaaaatggcagacaccatatagaaaatgttttctgtttccaaaggtggtccagtagttcaccctccagtgaggaattgagatgagacatttccaacaggaaatcctatgactaataaagcaagtcagctaactagtgggtgttatgagctaaagcagcctgtactatactatactaggtaacccttggggacatttggaattagaccaagtttaaatgaggcatctagttggaggaagcctaaatggatagactgaaggattcccaatgtacttcagaatcactcttgggccaccagatgtaaaattatgcacctggggatatgggttaattgtgagtggtaccatcgccaacacacgaagtctttataatgacaccctcagtaatgcacatctattacctaaagagtaggggaaattaaataatgccacaggacattctatgtggaatttcttccctcccttcccctcccctccctttcccttcccttccctttctctctctctttttttttttttttttttttttttttttgacagtcttgctctgttgccaggctggaatacagtggcacgttctcagctcactgcaatctctgcctcctgggttcaggcaattcttctgcctcagcctcccaagtagctgggattacagatgtgtgccaccatacctggctaatttttgtatttttagtagaaacagagttgcatcacgttagccaggctagtcttgaattcctgacctcaaatgatctgcccaccttggcctcccatagtgctgggattacaggtatgagccaccacacctggtgggatttcttaaagagtattattacacaagtatatcaaccatgtaatcgttgataacacaaatggatattgtataatataatttaatattgactatatagaccattgcagagatgggttcttgggctagaagcctctgatgaatttccaaacagaatacctatagtttcaagagaaatcttgccaaagaacagaacatgagtttagctgcaaagaggaatggctatattttggtgattttttttttcacatgtgcttcagattgtcaggcagaggtatatgccttagctatatcgttatcagaggtacattttttatctatatgtatgtttgtataggatttataacaaaggagataatcacagatttgttcatttcatcaaacatcaaaatactagacctgccacaaaggaatgtgtttgttgttatgaccctgtctagtacatcgcaaggagatccactcaagagaattgttttaacctcaagtgacattaaatatatattgcgaatatatagacttgacaacaatgatatgcgtaatttacatagtcaacagctaaaatgcatttatgtgtctgttctatgtatatttgttttactagttatgattcagctattagcagtgaatttttcttatatttttatttctgaggctagagagcactgccttgaattggacattccttatttcagcaaacgtattgctcacctatggctttctgtacattgggcataaaggtaaatcaagacatgattccaggactcaagaatctctcctggtaataatttttaagtgcaaataaataattataattaatggaagatcataatataattatgtgaagaggattataaaggtatggagtagggaagaagggaagacatgggctcagagactagaatggtcaagatcagtaaagaaatttcatggtaatccagagagaatagattagggcctaaaatgaggtagtggcacatagtaaatgctgaataaatgctagtttaaacggtgaataaggctgatagatgaggataattagttaactgcagaatgtaagagagagaatttaagaatcattgctgacagttctaatatataactggcaataccatcaattgacgtgaggactacttggaaaggcccctgtgtggagcagcttatacattcagtatcaggcatgttgagtttgaaatacccatgaaatatctaaaagcagacatcctatagagtattggtggaaaagggtcttgatcttgagagaaaagtagagaatttacctcttgatttaggaatctatgtcagtgtggtagaggaagtcattgaattgaattagatcatgtaatgcccaagaaaaagactagagtatgatcttgaggaatgccaacatttagggacaggcagaagaataggagatggtgaaggggtctagaacgagctgttgtagaagctaaaggagaaccagtcaggggaaatttcatgaacatcaaaggtgaaaaatattgtggacattgaagggaaaaagtttccagaaaaaaatcatgtccagttcaagagaagacagaagagacacctttgcctttgacaggaggataaggatggataggaagacaggaagcagaaaggcatatttcacacacccacttccagttcagcaccagagagaagataggtgggaagccctgggagtaaactgagttaaggagtgacttttagaacatggagatttcagcatttgtagacagaaaaaaagaatcaagtgtaaaggaagtagttgaagctataggaaagaggttttatccaaaaaagagcccacatagccaagacaatcctgggcaagaagaacaaagctggaggcatcatgctacctgacttcaaactatactacaaggctacagtaaccaaaacggcatggtactggtaccaaaacagagatatagactaatggaacagaacagaggcctcagaaataacaccacacatctacaactatctgatctttgacaaacctgacacaaacaagaatggggaaaagattccctacttaataaatggtgttgggaaaactggctagccatatgcagaaaactgaaactggaccccttccttacaccttatacaaaaatcaactcaagatggatcaaagacttaaacataagacctaggaccataaaaatcctagaggaaaacctgggcaataccattcaggacataggcatgggcaaagacttcatgtctaaaacaccgaaagcaatggcaacaaaagccaaaattgacaaatgggatataattaaactaaagagcttctgcacagcaaaagaaactaccatcagagtgaacaggcaacctacagaatgggagaaaatttttgcaatctagccatctgacaaagggctaatatccagaatctacaaagaatttaaacaaatttacaagaaaagaaacaatcccatcaaaaagtcagcaaaggatatgaacagacacttctcaaaagaagtcatttatgcagctaacaaatatatgaaaaaatgctcatcatcactggtcattagagaaatgcaaatcaaaaccacagtgagataccatctcacgccagttagaatggcaatcattaaaaagtcaggaaacaacaggtgctggagaggatgtggagaaatagggatgcttttacactgttggtgggagtaaaaatcagttcaaccattggaagacagtgtgacaattcctcaaggatctggaactagaaataccatttgacccagcaatcccattactgggtatatacccaaaggattataaatcattctactataaagacacgtgcacacgtatgtttattgcagcactattcacaatagcaaagacttggaaccaacccaaatgttcatcaatattagactggataaagaaaatgtggcacatatacaccatggaatactatgcagccataaaaaagatgagttcatgtcctttgcagggacatagatgaagctggaaaccatcattctcagcaaactatcacaagaacagaaaatcaaacaccgcatgttctcactcataagtgggagttgaacaatgagaacacatggacatggggcggggaacatcacactctggggcctgttggggagttgggggctaggggagggataacattaggagaaatacctaatgtaggtgatgagttgatgggtgcagcaaaccaccatggcacatgtatacctacgtaacaaaactgcacgttctgcacatgtaccccataacttaaagcataataagaataaaaaaaagaaatagagaggccaagtggaagcatacaccttttcctcagagatgtgaagaaaatgggtgcagatggaagaaattgtaatattgaggtgatctcatccagcttccccatttctctaaggaaaaggagaccagacattagctcataagagatttggagcaatggtagggactttagaacaaggataaaacttccatgcagaagttttatctgcatggactatacacactgattgatgtgtatatataatcattttatataatcatgtctttatataatcatttctccctgttttatttattgacctcttctgaggtatatataactttttattatatatgtttctaatttaagcaaatctaatccatatgaatatagaattttaaaataattgtgtgtgattattgcactgccaagaaagctctattttcacaaacacacacacacacacatcttttaaatagtgcgttcaaattatcactaaattttccaagatctttatgcacataacctttcaggaaaatatctaataaagtaaggcaatctgagagttgtatctgatcattatctgcaatgttggccttttcttcctgctcctttagataggtgtagtcccattacactacaaatgaatactccttttttgtgcatctaacaatatagtgatgatactctagcatctttacatctcttacaacattttattttgcagagaactccaaggtactgaattcatttgttcatcttgcagcctgtgtgcttttttttttaatccattaactatcttaatggaattctaccttaaacttttaaaatatatgtcatcagttggtggcttctatcagttgtattttgtcaaatgtgtaggtaaggaggagacgaacaaggcaaaggcttaagtctcctgcagcacaccagtttacatacatacaggtttgcagtgtggtttttcccccttttgtctgctgtagagccccctgagcttttcagctttatttctcacaagactgcacaattggaagaaagtaggtactctgactgatgcccattaatttcttattatttagaaagtggaaagataaagcagagaatgatttcagaattccttatcaaagtgagctaacttggtttaatgagtgttaaacagtaatatgggcattgctttgttttttggaataataatgagatgttgtacaaggtgcttgtgaatacaggaaagaatgtgaccatcagtcctttcactgcatgcctctgtttagtgcaatattaagtataaaaaggaaaaattcattgtattagttgacaagcattattcttcagagacctcagaaagcacaaagtgcaattctattgaaattgtggccttggtgacctgagaacttttttcaagttttggggcttctttgctattctggaaggcttatttcagaagatgtcaacaggtatcagtgagcctaatgagtcctccctgataaatggcatggatttagaaattcacaggtcctggggagtgtggaatagaattcatgaccctggcctcattatctgagcttacttcttacaactattacctttccattgcattttccacctgaagccctcacttcacttttacagtgttcttggttcttaaagtcaataagaaaagggtagtattttgcacatgtaagcattaaggtcccaatcacataaatcacttgcttaagatgactcaatcagtcaaaaatggaattagaaatagccaggtttttctggctaaaaggccaggaagttttattagcatcctaaatactgttatctcaaatcttagtaaatgacatcacccactatttttcaagtgctcatgctaaaaccatggtaatgagacttgattcctctctttctttaatgtcccacacctaatgaataagtctagttggttctacatacaaatatattctgaaaccactgctcaattctctaccactaccacctttgtctaagcaaccattagctctctcatgggcaactgcagtcgtttcttgactgatctcctcatgtttatcctttcacagtctattctccacgcaagaggcaaaatggtcttatgaagacaggaatcagatcatctctctcccctactcagcaaacatacttatgttacatccaaatttctctcatgctctaccaggctgtatgtgatctggtgcctccaactcctccacctcacatcctgcaatcagaccccagtctcactgactttcttgtccttgtttgttcccgcttcaaggtttttagacttactatgctttcttcctggaacactctttctcccagaactcctattatttcattcacatatctgttaaatattgtaattgcctaacaggttcatcttgcttgctgcacagataaaaccaatccactgagagcagtactgtggtaggaaaagtttaatagttgcaaggctagccaagtgagaggatgggagtaattactcgaatcagctgccctgaaagcttggaggttagagtttttcaaggatagtttcatgggcagggggctagggaatgggaaatgctgattgtttggcaatgaaatcgtagaggtatggaaaactgtcctcgtggctgagtcagcctctgagtcaggaccacaggactggttgagtcatgagtcatgggtctgagtggagtcagtcagttgaaaagtctgaaaaacatctcaaaaaacccatcttaggttctacaacagtgatgttgtctataagaaagattgggaaagtcacaaatcttgtaacttctggccacaggacttctgagcagtaagggattgtagaaaagcaagctaagaaacaatggctggttatcgtttaactacacctatatcttagcagaattcaggcccctttaatactcttaatcttatcacctttcagtagacttacaaaacaaggcagggagggtcaattttagggaggaactattatcatccttgcttcaaagttaaactgtaaactaaattcctgccatggttagcttggcctacacccaggactgagtgaggacagccagcctgtgagaatagaagcaagatggagtcagccatgttagatatctctgtctcaatctttgcaaaggaggtttcaatatcacctcttcagataggcctgagctgactctttaccatgaccagctttatttttcttcttagtgcacttactactatgagacattatatatttttttttcttttcttttcttttctttttgagacagagtcttactctgttgcccaggctggagtgcagtggcaagatctcggctcaccgcaacctctgcctcccaggttcaagcaatcctcttgcctcagcccccctagtagctgggattacaggcacgtgccaccatgctcagctaatttttgtatttttagtagagacggggtttcaccatgttagccaggctggtcttgaactcctgacctcaggtgatccacccgcctcagcttcccaaagtgctgggattacaggcgtgagccaccacgcctggccgctatatatattttttacatatataatttatatatagttttatatatgttttgaatatatgtgctttgatatttattacatataataaaagtttatgcatttattattataatgcacattttttatttaataaatagacttataaattaagatttacatttaaattaattaaaatacatttgtatatataaatccacacacacatacacacacacacacacacacacacacacttattttctctctcccccactagatgattaattccactgagtcagagacttggtatttttactgctaacttccatgcctgatatagtatatagcacataataggtgctcaatcagtagttgttgaatggatggatgtttatttccttaggacagatttctagagggagactttcttggtgaaatgatattaatttcatatattgtttaacaacagttatactacttttccactccaccaagcccagatgcctatattgtatctgccccacttattgtaatttctaaatctttgccatctctcagaggcagaaaatgatacttcttagtggccttaattaaaccaacttaataaaccaagacatacattatcaaaaacaaaaatgcaaagaaatttttatctaatatagggaatcagagacctccttttgagtgtccattaattcttctgggaatcagagaagacctgaaaattcagagaaaacacctatgcaaaatttttcttaaaagaagcttttgaagactattgtcatttactttcttaggtacatgcaaacttgcaactataggggaggaaaaaataattttctctccttctgagttcttggttgggaccgatccctgtaacaaaagacagattaacatgaaaacaaagaagtttattaacatgtatacctcatgtattgatgggaggtacccagagaaatgagtaaatctccaagaggtgactttgaattcaggcttaaatacaatcttaagctataacaaagaagggtgtagggaggccagtaatgaggaagtaactaggaaaaacacagtaaacaagggtaaggtttgttaagtggatttaaatcagtgccttctccatttactaagagtgtctggaggctagagtcattccttcttttcttggtagagtgagggagacaccccaacagataagaggtttttttaatagatatatacttctcttacaaaagagtgacctctactctggtttcagagcttctgtagctgctacaaggatgacatactctaggcctgctacacaaccattaaagaatcacatcaaagcagacttatttatctggttctctacaagacgtgcctgtaatattctgtattagtccattttcatgctgctgataaaggcaatttataaatgaaagacatttaatggatttacagttccacatggctggagaggactcacaatcatggcagaaggcaaggaggagcaagtcatgtcttacatggatgtcagcaggtaaagagagagcttgtgcagggaaactctcccttatataaccatcagatctcgtgagacttattcactatcacgagaacagcatgagaaagacctgcccacgtgattcaattacctcccactaggtccctcccacaacacatgggaattcaagatgagattgggtggcgacacagccaaaccatatcatatggtatgctttctatggcatcatgtaacttagatatacgaagatattaccatccattcacctttagtcaacatgacaaacattcaagaaggtatttctaaaactaagcattcttagtctaatattccttaaaacagaagagcaataagagcactggctcagggttcgggaagcctttgtttgaatccatgctctatcatttattgaatgactacaggcaagttgcttactctatttaagccttggggctttgtctttttaaacaattggggttatcataagacaacatttagagagtgaaaagcatgccacaacctggaagatgacttgtgatgtgtatatctgacaaaggactcctgttcaggctatatttaaagacttcctataaatcaataatgaaaaagctgacaacccagttttaaaaatgggctaaagatatgaacaaacgctcacaaaatatacaattggccaataaaaaaaagaaaaggagctcattatcactagctattggggaaatacaaattaaaaccacaagaagataccaccacacctccactagaatggctaaaatcaaaaggactgacaatactgataccatggattagacaagatgtgaaacaattgaaattttcatacattgctgatagaaatatatattggtacaatcagtttggaagactgttttcagaatctactaaagctagatatgaatatcttgtggcccaataattctactatgtatatatacataacaaaaatgagtatttatgtctaccaaaaaacacttaaaagaatgtacatagtagaattattcaaaatggccaaaaactgaaaacattttaaattttcatcggtagcaaaataaataaataaatagtggcatactcatacaatggggtactacccagcagtgaaaaaatatccttctgtctataataatacagatgaatcttacagacataatgttgagtgaaagaagccagacacaaaagaaatatattgtgtgatttccttatatgaagcttaaaaatagataaaactgatctaggttaatagaggtggttatctttgggggaaatctcaactggtaggggttcaagggagcttctagggtggtgaaaacactctatatcatcaggtgtattgtatttacgtgaatgtatacatacattaaaatgtattaaatttatatattttatagtacatgctatatcgcaattaaaagaaaaagaaaaaagtttaaaagtacagatagtaacagtttctatctcatagtgtttgaaaaataaattagataatgactataaattcttaaaatagtgcttggtctatagtgagtgctcaattactatgagtggttgatttgtgattattattgttacatttaccattattgtaagatataattgcctggaacagccattaggctagtatttttgctctgcgtaaagcaaattttcaaataatgactgcaatactgatttcagcttttaagaacaatggttcaaccaacttaacattattaggtttgtataaaggaagtttattattataaagttttttactttagtgtacaatgttttaacatttaaaactgtatttaagatttttgtttcctttcagagtaataaaaatttttaaaattacgttgaggtacaaagcatcattaatcttacaaaacaatattcttctgttttagtgataaaataaataccaatcaaattaacaatgagataccatattatgtctgttggataggtaaaggcaatagataattaggctgataaaggcacagggaagccatgatcttttgtgacactcctaagagtattcatttgtatgaccattctggagggcaatttggtatatgcatcaaaagctcagaaatgtacacgatctttgtcccagcaatttttcttcaaagttcatgtcctgaggaaattatcagatgagttttcagagatgtctgaatataatgctgtttatataactggtttattgaatatatgaattcaatgaggtacaaacatgatagcctttacagccatgtgttgcttaacaatgcagatacattccgagatatgcatttttaggctattttgtcattgtgcaaacatcattcagtgtatagtactcacacacatctaggcagtacagcctactacaggcctaagctaaatagttttagttccttctcacattgttaataaagacatacccgagactggataattttttttttttttttttttttgagatgcagtctcgctctatctcccagtggcacaatcttggctcacggcaacctctgcctcctgggttcaagagattctcctgcctcaggctcccaagtagctgggattacaggcatgcgccaacatgcctagctaatttttttttgtatttttggtagagacgggatttcatcatgttggccaggctggtctcatactgacctcgagtgatctgcctgcctcagcctcccaaagtattgggattacaggtgtgagccactgcgcctggccgagactaggtaatttataaacgaaagaggtttatttgattcacagctcagcatggctggggaggcctcaggaaacttaccaccatggtggaaggggaaacaaacatgcccttcttcacatggtggcagcaaggagacgtgccgagcaaaagggggaaaaaactcttatgaaaccatcagatctcatgagaactcactcacaatcatgagaaccagcagcatggaggtaatcatgcccccatgattcaattacctcccaccggctccagcccatgacacacagagattatgggaactataactcaagatgagatctcggtggggacacagccaaaccatatgaactatttagctcctatgctacacacctatataacaggttactgtactaaatactgtaggcaattgcaacacaacaataagcatttgtgtatctaaacataggaaaggtaccataaaaatattgtataaaagataaaaaaatggcatacttgtatagagcatttaccatgaatggaacttgtagaggtggaagttgctgtgggtgagtcagtgagtgagtggtgaatgtgaaggcccaggacattcctatacacttactgtactaggatattactgtagactttataagcactatatgctcaggctacactaaatttatttttagaaaaattctttcttcagcaataaattaacctcagcttaatgtaacctttttactttataaactccaaatgtttttaaacttttgacttttttgtaataacacttagcttaaaacataaacacactgtagagtgctacaaaaattctttatattcttattctctaagctcttttctatctttaaatttatttatttatttcactttttacactcttttattaaagactatgacacaaacacccatattagcctaggcctacacagggtcaggatcattaatgtcactgtcctccacttccacatcttaacccactggaaggtctccaggcacaattacacagtggagctgtcataaatgataacaatgccttcttctagaatacctcttgaagaacctgcctgaggccattttacagataactttaatttttttataaatggaaggagtacactctaaaataattattataaaaagcatagtatagtaaatatataaactagtaacacagtcatttattattatcaagtattatataccttacataattgtgtgtgctatacttttatatgactggtagcacagtaggtttgttcacaccagaatcaccataagcacatgagtaatgtgttgcactacaacatcatgacagctaccacatctctaggcaataggaatttttcagctcctttataatcttatgggaccaccattgtatatgcagtctatcattgactgaaatgtcattatgtgacacatgactgtacactctgttgaatctccctttctcattcctcaaagacattgtcagatatcagaaagtctggtcttatttgaaactttaggctcttatccaattgaacactcccttttttctggctcaggttgaaccatgaaaaggggcatggtctgctctttcttccgtgttccatgctttctgattcttgcgctttccattgttagggataagaggaggaattagaggagaaaaaggggcaaatgcttttgtacttaatgacaattatggttgtcctctgagtgacagatgtccagatgctgtctgactctctcagggacaatgtgtgaattcttcataaggcttgttccctgacctcttacaacccttcctcagcttgtgccactaaaggtccacacttcagcctcttgctgccaaggtcctagtgatcagacttcttacgttgggcactaacaacatgatttgagccaggccacctttcaaatcatcctgttggcccaaagaaatcttactcaactttgttatgccaaactgagattataggttcttctccttcttacctttcttgctccaacacaatctccctccgaccacaagtgaggaacaaattgccaagacctgcagtagtctaactggggaatgaaatcccagtgtccccttcttacctccatttctagctttattagtttgggattcagaagctcccaaccagaccagaaattcatgactctagtgagtcctcccatcttcagactactttataaggcctggacaggtgggtgatagggtgctggcagctggaccagttctactaaattttataaatcctgcaggactgtgttgggggtttctgaggaactttctctaacatgctgtaatactaaataccagttgctttcaattctcagttgtgtccttcattgaggccacagaagtctcgttcggtatccttttaacattaacaaaagtgcaaaccagagataaccaaaatatcaaaagaagattgctgaatatagtacattcatataaataaatatcatttggtgttagaaatcttaatccagttctgcatttattgacatggaaaatgttcttgatttattcctaagtgaaaaatattagttacagaacagtatgtttctgtatattcatatttgctattatgtaaaaaatagtgtagagtaatgtataccaaaatatcataatgctagttcaaaactattgcctgtgatccaaatattgcctgccacctattttcataagtaaaattttactggatcacagccatgccagtggctgctttcctgctacaaagcagagttgagtagttacaacagagacagtatagccacaaagcttaacgtgtcttctggggctgtacagaaaaagtttaccaacttttattctagatgatagaatcatgagtaattttaataatttaaaatttttgtctgacttcattttttaaattttctgcagtgagcatgaatttattgtataaaatatgtatctgttattaaccactgaattctgattagaaaatcttattacataaataaaattaaactcaaaagcaaatcttacaagtcaaataataaaaatttgattacagctttcaaagttctaattcaaaatataggacctacattgtaggtagaatattaattttttattgtttttaaaattaagacctaggtatggacatgactcttccatatgccaagaggattggtttcttaaaacttctttttagagcttctggtatattctttttatcttagcatattagtcttctgaggctgtgtttgagtagtatagtgctaagtttgatgaataaggtggattaatttgagtaaagattttggagtaagaaataagggtgatacattttgaagactggttttctttacatggcttatgaagtggacataaaaggagtatcaaagaaaagagttttcaagcatttggagctttggaaaataaatgaatcagtatggaacttcccaaggacactactttgaagaaataaattcacttggatgcataaattatggatatttgttacaacgaacaattctgatgtagctaagcaaattttccttcaaaatcctgtaggataaagccttctaaatgtgtttgagtaatcaagaaataattaggacagtcagaaaacctgctaattaacattaggtgagggaatacttgaaaatggatttcatcttaaccagaagttccagatgacatgcatctttattaagagaaacagaagtaaacagtacattaattaaactttcaaatacacgaagaggcttttaaaataccagtaaggaatgaggaataatacaatggattttcataaaaatatcaagcaattaagataagaaataataagattaggctttgaagtttatacatttgcatattgagaaagaatgccactattcaaatatataaatatatcagtgacttttcaaattttaggatctgttttattgactagatagtatctatccaataacagaatttcctaaatagggtaaaatcatttacacatttccaaagtcaacatttttccttaatattctcaaagattaagactctggcctatctgagaaaaaaaatttaaaacataatttatctgaattttagaccatgtaagtgttaaacatactatacatctcaattttaaaaggaaagtgtctgcccttagtatatgttttaatagttttaagatattctctgccttctggctcaattgacatctataataatatctcccattacacttgttgccagctctatgctcaactaccaggtattcaccaagaaaaccccaagatttctaatacctaggtatttccttatgtttctgcttccaaccattcacttcccactcattttcttcccactcattttctttctttttttttttttttaattatactttaagttttagggtacatgtgcacaacgtgcaggttagttacatatgtatacatgtgccatgttggtgtgctgaacccactaactcgtcatttaacattaggtatatctcctaatgctatccctcccccctccccccacctcacaacagtccccagtgtgtgatgttccccttcctgtgtccatgtgttatcattgttcaattcccacctatgagtgagaacatgtggtgtttggttttttgtccttgcgatagtttgctgagaatgatggtttccagcttcatccatgtccctgcaaaggacatgaactcatcactttttatggctgcatagtattccatggtgtatatgtgccacattttcttaatccagtctatcattgttggacatttaggttggttccaagtctttgctattgtgaatagtgccacaataaacatacatgtgcatatgtctttatagcagcatgatttataatcctttgggtatatacccagtaataggatggctgggtcaaatggtatttctagttctagatccctgaggaatcgccacactgacttccacaatggttgaactagtttacagtcccaccaacagtgtaaaagtgttcctatttctccacatcctctccagcacctgttgtttcctgactttttaatgatcgccattctaactggtgtgagatggtatctcactgtggttttgatttgcatttctctgatggccagtgatgatgagcattttttcatttgtcttttggctgtataaatgtcttcttttgagaagtgtctgttcatatccttcgcccactttttgatggggttgtttgtttttttgtaaatttgttggagttcgttgtagattctggatattagccctttgtcagatgagtaggttgcaaatattttctcccattctgtaggttgcctgttcgctctgatggtagtttcttttgctgtgcagaagctcttgagtttaattagatcccatttgtcaattttggcttttgttgccattgcttttggtgttttagacatgaagtccttgcccatgcctatgtcctgaatggtattgcctaggttttcttctagggtttttatggttttaggtctaacatttaagtctttaatccatcttgaattaatttttgtataaggtgtaaggaagggatccagtttcagctttctacatatggctagccagttttcccagcaccatttattaaatagggaatcatttccccatttcttgtttttgtcaggtttgtcaaagatcagatggttgtagatatgcggcattatttctgagggctctgttctgttccattggtctatatctctgttttggtaccagtaccatgctgttttggttactgtagccttgtggtatagtttgaagtcaggtagcatgatgcctccagctttgttcttttggcttaggattgacttggcgatgcgggctcttttttggttccatgtgaactttaaagtagtattttccaattctgtgaagaaagtcattggtagctcgatggggatggcattgaatctataaattaccttgggcagtatggccattttcacgatattgattcttcctacccatgagcatggaatgttcttccatttgtttgtatcctcttttatttcattgagcagtggtttctagttctccttgaagaggtccttcatgtcccttgtaagttggattcctaggtattttattctctttgaagcaattgtgaatgggagttcactaatgatttggctctctgtttgtctgttattggtgtataagaatgcttgtgatttttgcacattgattttgtatcctgagactttgctgaagttacctatcagcttaaggagattttgggctgagacgatggccttctcactcattttcaaccctattctatgcttatccaaatctgaccttcgaaaccttaaaaatgtcacttctttaatgaaaaatgtctcattcttcccaagcggaagtaatcattttctgctctatgctctcacgcctcttaccagtttctgttgtaaattagagatctttgaatgactgtctcatttcctcctgctatgctgtaattttcttatagtccatacttactttatttactattctctttagtgtctagcacattgtcagcaattaacatattgttaatatgtacttgttaattcataaattacccctttgaaaacaagatatgaaaaggaaatctttttcttaaagaaataggaacatagagaaaatatataattttatacatgttctcaatataacctaaatcaaatgattgttgagcaggatagatattttcacttacgccaaataaatatactttaaaaactaacctacaattgtaaaacaaagcaactgctatttcacatctagggtgactgttgtgtacttttatatcactagtgatatattaagtcctccttttgtgctgaaatattagtgtaccacagactgatcagttagagaaaacatcatgctcatttatgccacttactaatctgtgggacattatttaattttgaaaaggctcagtttcctcatctttaagataggaataatcattttgagccttacctatttcacaagttttctgtgagagctaataagacaatgtaagtgatagcactttgtaaactgtaaagttctatataaatttaagggtttatgagggacattagtataagggacattattagtaatatgagagaatgctgtcaatggctgaaacagatcagattcttttagatcaaattcatatgaaatgcttgaagcaaggaaagattttagtatgtaataactttaattttcatcgcaagaaactgagtaattccaaatattaagattactgaattattttgctgctttatgagttctgtaagattgcaaattcaatctgagggatccttatagatgagagggttccaggcctaaaatattatccaatctaatttgctgactattaccaattaggaagaatcattttatgtccttctctcacactatacaggtcagtttaataaaagtctaagagcttttccatcatattttttgtcatcctgaagttttagtacagtcactgaaagggaatatggaatgtgcaacctaagaataaaaaagaatctcagtattcatttattctaagtaaacccagatttggaatccctccatagcaccctctagctgtgtctagtctcaacctgaatggatccaactcaaaaaaaaaaaaaaggatggaaatcaactgctgattcctaaatcaatttggcttttctttatgtaatattttagtagaaatatgatctcccatcatttgcaatgtgttctaaaagcttaggtttacccatatacagaaccttgtaacatacacacagaaacacacaccacattgctgttgcctagtctctccttccctcttagtcttctaggccaatggtatacaattccaaattagctaaggcaattagcaaatatattctcagatttaattccctttctctctttatgagagttaatcagcatatctatagacattttctaagagtaccagctctactaggattaaatgtgtgatggattttgctgttgcttacaaagccccagtttgtttcccaaaggagtcactgaacagagcctgtcttgaatagcaaatgaacttcaatgagttagattctgttaaagtcactctaactctcatagcctgcacatgggccttgaggattataagcatttaatagctacatgatcaaactgccaaaatgtctttaaatgacttggctaatcttcatattgtgcttatggttaatgtcattatttaaaacttttgatttagactggtggtaattaataaagataatgaatggaagcttggtctcttatattttggataaattgcattgccatccacagagcagcaaaaacttaactaatcataatcaaaattaaccatgtttcttctatcccacaatccacagttaaaattttaacttggtataaaaattaagtttaacttatctctgtcataattaaacataagtagtcaaatgaaactaacatggcctaatggcttctttcatgttaccttcatatcatgtaattgtatcagagggaaggtggttttgtttaataataaatatttccttgtagagtaatttatgactcaaggatttcagacagaaagttacctgctccaactgggagaacaaagtcatttttcataagtcatccttatcttgggatgacctaatatggaaactgatggcatagtgttctgtttgatttaaacatagaggttgatttaacctctataaactgaaatctatgctgcaataaaaacttcacataagaatcaaatttctatttttaattcatctatggtgatttatctttgtttatatgatatatgaggcttcaataagatctctctgtgtttctcttagaagataaagggaagttaaaagccagcagttccagtcagccatcaagctctgaaagtggctcatttctcctcaaatctggcacaacacccctgccacctggagcagccacttctccctccaagagcacaaatggagctcccggtactgttgttgaatcagaagaagaaaaagccaaaaaattactttattgttcactatgcaaagtggctgtgaactccctgtcacagctagaggcacacaacacaggttagcagctatcttttgcatttaaataatgtttataacaaaacccaacttttcccatcagaataccatatcttttgttgttcagaccttaggtttgttccatgcttctctacttttttgattcaaaggagtgattttagaaaagtatgatcatatgactttggaactagcaagacaaaagcagtttggagatcaaacttgttctattctttattttcttaaaaacatctaatactgtccaaaactcattttgatgaagtgacaaagatgaagataaatatttatgcacagtgttcactgcaatacacttaaaagagaaaaaaatggaaacaacctaaagcccaccagtagggaaatactgaatatagtaacccaatatgatacatgttaatcagccattaaaacataatgatcagaaaatatgtacatgatttgctatgtgaaattttcaggatatttaattagtatgatccccattatgaaaactgtttttagtacattaaaaaaaagaaactgacaagaaataccctagaatgataatagtggttacctctgagtagtgaaaatatgagtcatctttatttccttatgtttctgtatattttctttattatatacgcttacatttttccattttttacaataacgtgttaaatttaaaatcagcattaaagtgatcatttttaaaaaagcattgggaattttagcctgcaggtaaacttctcaaggataagaaaacaaagagctttatataattcttggatagctatttaatatgtgtctctttctgtcttaggatctaaacacaagaccatggttgaagctcgtaatggggctggtccaattaaatcctatcctagacctggatcaagattaaagatgcagaatggcagtaaggggtcaggactacagaacaagacatttcattgtgaaatctgtgatgttcatgttaattcagaaattcaactcaaacaggtaacgtatcctgaattagtaaacattattgttttaggtcaccacttgactgtgtatcttctcatctatagaatggtttttactgtgctcacagttaagttgactaacttttgtaggatgcagacaatatgcaacatataggtgctaacatggaagaaaaagtcagtatgaaatatttgagcatctactgttactatatgtcaggttccaggctagatgttggagagataggaacagtagtcactggagcctacagttgagcaggagcttctggtaaggtaagatgttaagcctatcttccaaaggctcaaaatctgattagagagactcatcagtaacagtggtaataccaggcaaaatctgataagggctatagagaacaggagggggacagaggggcattacaattgagggaggactaagtcttaatttagaaatcataatgattttacccacaccatcgtggaactatggacctagagttggcaatggagaaaatagctacctagaaatacgttttacatggaataagactcacatttcagtccagctaatgcatcaaactttttcagcacatttctagccgaaggcataaagatcgagttgcagggaaaccactgaagccaaaatacagcccttacaacaaactccagcggagcccgagtattctagcagtaagtttacctcacctgctcacctgttttgtggggcagccttgctgggttgggcagccattgtgggcaaggagggcatagagtctaatgtcatgaaaggtttcaaatttaaatagccctcatagacagaagttttagaatgaactgcttagttcctgctatagggcaacttacttagaaaacagaaactgaacctctttaagagctaatattttactctttaccaagttgttttcaaaagactatcctctttagcatataaagtaaaggctcaagaacaaggacaagtgatgcctaaggaatcctggaatgctgaacctggaaagagggatttctttcataaaacaaaaatccatccatttaatttaatatcctcatgctttctgttttttattattattattatttggcatgagaaggtaaagcggtgtctgtatcgtgtgctctctccattctagcaggcatgttggtaattagcctgttttatctgctctcaatatgtgctattttcagtgtctttgcaaaaacacctagggactccagcaataagtgtcatataaataccaagatggatagatttcacaatctccctgggactgggcccagtgcagtgttcagtctgaggatgaagctgagcttgtccagctggaggcaattctgagattaccttccagcttctccaaagcctctgtctgatgctgcaagcaggtgttacctgcattaagcaaatccagcttgcaatgctcctcctgattgcaagagagagaaattaaggattgatttcttcacaggaggattccatcctggcattccgttaaatagagagtttctacccacttacaatcattctcaacaacagaaatttgatttagctgtgatttttcaaggactactcattaagtagccagtgagagaggtgtgaactgactgttttcttgactcttcagggtccctaaagtcctgaactcattacctaacctcaatgcagcttatctaagagaagggaaggatcacacttattctcaaaaaacaaaacaaaagtctctaggtctcgtcatggtttaagacaagcctgaattttgcattgaacttcatcatctaagcaggaaacttctgggcatgttttttttcctggtgagcagcagcataaaatagctttagaatttattcagaggcctttccctgtgccctagcacacaggagcaaagaccaccaaataaaagaaagctatgccatgagccactgaaaccagcattgtgaaaataatgatttcttgacttctgagagtgaagattttcaaaatttaagacttcttaatgttggtgttttacttatgaaaagatgcctgtggtgctgttattcaaaaacaggatctccaccccattcctggttttctccctcccttaggcaaaacttgcattccagaaagatatgatgaagcctttggccccagccttcctgtcctcacctctcgcagcggcggcagccgtgtcctcagcgctgtcactcccaccccggccctctgcctcgctcttccaggctccagccattcctccagctcttctgaggcctgggcatgggcccatccgcgccactcctgcctccatcctctttgctccgtactaacgtctgcaaaccccaagacgtttgaggccagtaggaagttgagaaagaaagccacaaggattcagcaatttaagcagtttgtgttgcagtaccccccattcacccacaaaatgcagcccaccacccagtcccccaattccagagagaaacacatcactagattgacgagggcttttagagactgctcctataattgaggaatcagcagcataggctttatctccctacttcctcccccaccctaccgcgttcaatttgtgtatctcagatatttgatttcttgagcatgtattggtcagaaagaaaaagaaagaaaaccattctctatttttccatgggtatgatctggcttaaaacaatatggaatattttcctgacagacttgaaaactaggatcttcctcagatgtctgtaaataactctggtatccaactgggtgtattctagtgtggaacaaaaaacagtgaacacaagtgcttacttgtggatactatcttaccaacggatcacaaagttctctttttggtgtactgttgttgacagggattgtgtactgtttcgacccaagtactgctgtatcctgtgtagtactagatctgtatctcttgtctgaattaaacatttttagttgctgtgtaaatgttaggaagcaaagtagctttgaattttctctgtaagagaataaaagataaaataatgtattttctttatttcacattttatttggagatatttaaatgaaatagaaagccatataacatagctataattactacctgtttgctatttttgtttaacttattttgtagcttcctcactggtttgtgttgctaagcaaacgtatacaaacagaaaaagagcttcctaaattgcacatttttgcacctcttgtgcattctgcaagaagacaatgaatccatgtatttctatataagtatcttcttcatttttaacctgttttcatttgtaatgatgctacataattttgtggctccctaatgcaataatgtacagaagataaaaaaatttataattgaacaatttgtctttctgttcgctgaatatattgcaggtcatgctcccatgcccccctttctaagccgatatcaacaagactggaatgtttgtgatatcaggggcaagagttatcatagaacaacaaaatagagtggactcttttagagcatctatatctgcaacctgtaaatggtaaaatgtctgtgtatttttttaaatgtaccttttcaataaaagtacaaaaaataaaa

SEQ ID NO: 5 - DNA, 69056 bp, Homo sapiens
  gene (1)..(69056): Also known as DTL
  ref <308>: DATABASE ACCESSION NUMBER: GenBank/AC_000044 REGION: 185436210..185505286
  ref <309>: DATABASE ENTRY DATE: 2008-03-03
  ref <313>: RELEVANT RESIDUES IN SEQ ID NO: (1)..(69056)
cgataacgatttgtgttgtgagaggcgcaagctgcgatttctgctgaacttggaggcatttctacgacttttctctcagctgaggcttttcctccgaccctgatgctcttcaattcggtgctccgccagccccagcttggcgtcctgagaaatggtgagtaacggtcccaaccgctgctcggagctggcggaattcatttcccccgaaacacacgccacctccgaccagggccgactccaattctgaactcagcttctgagttctcccatggcaagggtaaattagtgttagcagggactactaaagaaagctgtactttcatcccctcgggacacttgtaatcgtaatcgggcttttaaaatcgtaacgtaggcagggacgtcgaaataactgccttccaaggccccttacagcttacatctccattgcgcgttaacgggaaaatgcatgcatttgtgtgtatatgtttccttcaacggttatttgagatgctcaaaactcctaatcattgattaattcattcgtttgttgtagaatcttagtgagcccagctatgtgctataggtatataccagtgaatatgacccgctgttaaggaactcagtcaagcagagaagacaggatatctgcttctaacaggaacaaaatcttattttccccgtttactacacggtcataaaaatttaaattatagagtgaaagatgcctgtaaccacatccgccagagatgacccctgttaatagattgaagtatattattccagatgttttcgacgctagaggtaatacctattattttcagaaatcggatcaaaacgtccagttttttcactttaatggtataagttgaacgtattcccatgttaatacgtagaaatctaacttattttcttacgctaaaacattggcaataagagatttgaggttagatttggatgtcatcaacttaaactttttggtaagtttcagataagggagctaactacccagattaaccttggacagaaataaaatctcactcatgtgaaggtcgactatagccagaggttctttttccccttgaaactatgtggaaaacgaacctgagaagggaatttttatattcagcgatgagtctaggaaaataatattgagaaagagactgagaagtagtccctcaacttcctgctagcagtctgaaactttataccatccttatttatttccctcttagataatctttgtaattatacttaaatgctcctctttctgtctctcctgggaccttgtttgagtaacttctttgtcctctgtttaagagtgacagtacgcacagtggctaagaactctgtctttgaagttaaactgcctgggttttattatacttccacaccttactatatgtgtgttctgggggagctgttcagcctctattttgtgacagattttctcctaattctccatgtgtttacctttcccttccctctttcctattctcaagtactcattcgttgttacataatagtcactgaaattcattcgttattatatgaaatctatagaatcatctcctttcctcttcagtgttggtgttccatccttgaccccttttcttcttctacctactcctttggatgatcacagccacaaccagggcttcttccacttctacatacatacaaccttctgttacttatatagtaagtcctcacttaatgtctagataggctcttggaaactgtgactttagggaaaacagtgtataactaaactaactctaccataggctacttgatataaataagaattgtttcagtggcatattttggtcacacaaacaccaccgaacttctaaagaaagactcaaagtacttttaatattaaatgttgaaataattgtgtgctatacatatatttgagaaagattaataaaaacaggtgagataattatccaagttttggtgtatcagcgagtgacctcggtcatagtggtggtgggctaaatcaaggaataaatgtttgcaaagtgaaaattggaaggagcacctcctaccaccacccaggtcaaaaacaatcacaaatatggcagctcactgagccctttcataccaaatcgtttattgtcattcatttgtatgattattgtaaagtttacccatttttattttacaatgatttgtattcattcattttctgacacacttattccagctcagggctgtgggtgcccggagcctatcctggcagctcatggtacaaggtggaaaccagctctagaccagacactatttcatcacaggaagcactcacacacactcattgtctactgggaccatgtagacacaccagtgaacctaacatacacatctttggcatgtgggaggaaaccagagtacctggagaaaacccctatgaacatgggaagagcatgtacaaactccacacggccaatggcctcaaacaggaattgattttttcctcatgaacagtataacgaaatgacattgtacaaaattatgttattggaagacttcctgtacctgagattcatttctataaaagctgtgtgggttgattagcacctagacggtcaatcccacaagcatctcaaactcaaatacccaaaactgaactcagcttttcccccaaacctgcaatattaccaattttagagagtggcctcattatttaaacctgccagaaacctgagtaaattaaagacttcttcatcttcctcacagttacacattcaaaacatttcgttaaaatctcttgaatccatcctctcttctttatctgttatgattatgcatctttactgtatgctggatgtgttctatttttactattccatttccctaggttgggccctaatgccttcttgtctggattgtaagaagtctcccagatggcctcctagtttgtctgtcttcggtttattctccacattgctgctaatgatccttctaaaatggaaatctgattactcttctgtgtatttttaaattgatatctaaaagtttttattataaacttaaacaaatgcaaagaatataatttctgaccatattgggaatattgacattttaaaaataaaaatgctatatcactcctttaagtgtatctaatataatttaaatactatagtgatttgataatcacatcatccattttttagaaaaatacaaactcctctttatctgctggacattccatatagctgctttttcctcttgaatttatttccatttcatttctcctacagaatttctcctaatgtaatttaattttatgcttgaaaagctcttttactgatcactctgtcatacccttctgtgtcaaaaaatgtgtttaaattgctgttttctgtcataagcctccaagtattaaaacttctttatggattgaattttcaattcaattattagtactatatgattgattaaaacaatatagattaccaattttgataattattaaccaaaagtaaaattttattggaagtccatctttttaaagagatgaatttgggtgtttatggtccctttattgaaggaattatttaattatctcttagttaaggttccaccagtttatttgtttttatttaaaaatatttgatacccaaaagtttttattctttggatcagtgcaaggtttaagattggggcacgggaatgcctttcttttataaagtggaagaaaggaagtgatgaagggaaagggaaaaagtggtacctcaaccttctcagagacatcaggtttttcagacaggtgagttttagaaatgcgtatatagtcatccaattgcttataaatggagataacattttgagaaatgcatcattaggtgattttatcattgtgcaaacatcacagagtataaacacaaagctagatagtgtaactactacacacctaagctatatatttttcctaggctataaacctgtgtagcatattactgtattgaataccgtaggcaactgtaacacaatggtaagtatttgtgtatttaaacatagaaaaggttcagtaaaaataggatataaaagataaaaaatggtaacacctgtggagggtgcttactatgaatgggagcttgcaggactgggggttgctgtgagtgaatcagtgagtgagtagtcagtcagcacgaagacctgggacattatactactgtagactttataaacactctatacttaggctgcattaaattgattaaaaaatactttcttcaataataaattaaccttagcttactgtaacttttaaacttacaaacatcttaaattttttaactttttgacccttgtggtaacaggtagcataaagcacagacacattgtataattgtacaaaatattttatttcttcatattcttattctataagtttttttattttaaatgtttttcttttcttaacttttcaaaccttttgttaaaaactaagacacaataggaatttttaagctccattataatgttgtaagactaccattgtgtatgcggtctgtctttggccaaaatgccattacatggcatatgactgtatatcgtagttgagtacagtagtacctccttatccttgaaggatatgttccaagacccaaccctatgtatgctgtgttttttactatacagacacatacctatgattaagtttaggcacagtaagagattaacaataactaataataacatagaacaattataacgatattctgtaataaaagttatgtgaaggtggcctctcggaatatctcatggtgctatatacttgcccttctcatgatgatgtgagatgatataatacctacaacatgaagagatgaagtgagatgaatgacgtaggcaggcactgtgatataacattaggctactacttccaactatgtgacagacaaagcagcttctatgtgatataacattaggctactactcccaactatgtgacagacacagcagctaagtgactaaagagcaggtaacgtctatggcactgctactctggacacagggatgattcatatcctggacaggtcagggtaggacagtgtgaaattttcttgccactcaaaatggcacacaatttaaaacatgaattgtttatttctggaattttcagtttaatagtttcagaccgttgttgactataggcaactgaaaccacaaaaagcgaaaccacgggtgaggggtaactactgtatctggaaattgagtctctgaaaactctcatgttcttgtatactacttggaatatgtgcatgtaactccaggggcttaagttgtacaatgaggaaataatagctttttccaaatgtgttgtggaggaaagcattacagtttcatgttcataacacaataaggatccaaaagtagcttagggtggttcatcagtgaagtgtgtattgcagggattgcataagtagaggggtaggcaaggaccaatcactcaccattcattggtgtttggatgttaattataggcagtgaggcagagttaaagagtcattgtttaattgtaaaaaattgtaggttttttggagtgtatcatcttcatttcaaccaagttgttcaaaagtcccttttgagtttttattttgcagttgatttttttttttaattccaaaacgtgtatatttacataacctttgaacagaggcttttgtttttacacacttattccgtaggttaatacttgtgacctcaacataactattgcatttttggcgggggggtggggggtggggacggagtgtcgctgtgttgcccaggctggagtgcagtggcgaggtctcagctcgcggcacgctccgcctcccaggttcactctattctcctgcctcagcctccgagtagctgggactacaggcgcctgccaccacgcctggctaattttttttttatgtatttttagtagagacggggtttcaccgtgttagccaggatggtctcgatctcctgacctcgtggtccgcctgcctctgcctcccgaagtgctgggattacaggtgtgagagaccgcgcccggcctattgcattcttttagtggtctttaacagctcctttacaatgatatgtgatgctgaaattatgacgtgatggccccagaactaattaaatttggattaaatttctttggtgcccttctgttgattcattcagattatgtctatgaacatccaaatgtagatttgtctgaggttatgtcaggctaagatgtattctccacatagtacttttgatgaaaagtgaggattcagagtaccctaaaatgtgagtttgttaattatttaagatgctttcaatagattgtaaactcagtgtttcctccaatgcttattgaacatttggttttcagtaattacttgttgaatgaatgtttattttatatatttaaaatgtcttgatcacaaatcagtataataaaaacaaatctctgaagatgtctttactatgtaggagcatagtgcacattagacctctgacccaagcagaataaacttttcttctaccctgagtctcttgttctctgttctaaattcagtgaaaatttacccatctttcaagacctcctgtaaagactccctgacccactaccactagccagggctaattaaatgttttctaggggtaggtacataacacttcactttacaatttctctaatataatttaaggtactataattgctgctattgacattttagattcctacaatttcagcactaaaggaaaacagaagtaaatttggtgaatatgttactggctatagtagctgcattgacatattattttctttggctctttgaccattggattttgtatgatgttctggaataagaatttaattgaaggggatagcagttttaatggaatgcttttgtggttgtctctttggtaggagaagggggaagatctttcttaatatgcagaggcctcttgtttcttctaatctcaatgtactagtgagagtctccattttagatagtaagcccaaagctatacctccccagaagttggaagtgctctttcattttttccttaggactccttaatgaaataacagaaatggtgtcttccatagatattaatagtaagtggatctatgttaatatctaaagtttcttaaggacaaatatttacctctgaatttgttaaaaatgctgaaatgtgatgctgtattggaattctataaggaattatcttgttttaggatggtcttcacaataccctcttcaatcccttctgactggttatcagtgcagtggtaatgatgaacacacttcttatggagaaacaggagtcccagttcctccttttggatgtaccttctcttctggtaagagaattactatctaggcaaggcttggacagaaatgatctatttcacacttatagggaaaatatactagagtatttccctttcaaagaaaagtaaattaggtggatgttagagtttttgtaaaaactgttatcttctgatttataaaatagacttttcttaatctctatacatcattagcataactatatttcctctaaagcataggactattatagcactatttttaaaaaatcaatataaggaaggggttgcaaaggttcagctactatgaaaactgttttatccagtagatacataccctttgatctggttgaatgtatctttctgtgactcattggggaatatatgaacagaaatagaagtacttcagccaggctcagtggctcacacctaaaatcccagcactttaggacgccaaggtaggtctgggcacagtggctcacacttgtaatccccgaactttgggaggccaaggcgggtggatcacttgaggtcaggagttcaaggcagcctggccaacatggtgaaatcccatctctactaaaattgcaaaaaatcagctgggcgtggtggcgcacccctgtaatcccagctacttgggatgctgagacaagagactcacttgaacctgagaggcagaggttgcagtgagccaagatcgtgccattgcattctagcctgggtgacagtgagacttcatctccaaaaaaaaaaaaaaaaaagaaatagaagtatttgtctccacccataatagtttgagaggaaagaaaaagttgtgacaaggaaatttaaaactaatagactccttataaaaattagccgggcatggtggtgcatgcctgtagtcccagctactggggaggctgatgcaagagaatcgcttgaacctgggaggcggaagttgcagtgagctgagatcacgccactgcattcctgcctaggtgacatagcgagactgtctctcaaaaactaatagactattacatagtcatgattgtggtaaaaataagtaaataaaaatatggttaaaaaaactaatagactcagcctgctggcagcctacatcatcatatgcctttgtttgccattggccagtaccactcttgttttaagtactaccctcgatttagcccttctctaaataagagattatctgaagaaaattttggtggttttgagtaagcttaaaaatttttgtagctaggcatggtggctcacgcctgtaatcccagcactttgggaggctgaggtgggtggatcacttgaggtcaggagttcgagagcagcctgaccagcatggtgaaaccccatctctagtaaaaatacaaaattagctgggcgtggtggcgcatgcctgtaatcccacctacttgggatgctgaggcaggagaatcacttgaacccaggaggtggaggttgcagtgagccaaactgcactattgcactccagtctgggtgacagagcaagactccgtctgaaaaaaaaaaaaaaaattgtgttactctatatatttttttctttatttctgctttagctcccaatatggaacatgtactagcagttgccaatgaagaaggctttgttcgattgtataacacagaatcacaaagtttcagaaagaagtgcttcaaaggtaagtctaggtctacaatttttgttttaacatttaaaaaactttacacatcctcaagtatattattatttgaacacattctgttttagtctgtcttctgttgctataaaggaataactgagactgggtagtttatatagaaaaagtttacttggtgtgtgattctgctggctagaatagtagacatctggtgaaggcctcaggctgcccccactcctggcagaaggcaaagaggagcccatgaatacagaggtcacatggcaagagaagggtgtactaccaagctcttttttaacaatcagctctccagggaactaatagagtgagaactcactcatcttttcacctcttagggagggcgttaatctgttcatgagggatccacccccatgacccaaatgcctcccattaggtcccacttccaactttggggattaaattataacatgagatttgggaagggacaaacatctgtagtatatataacacattcccaatgatattaacttctgattaagtctttttagggaccagattagatgtgaatggtggactgcctatctgtcaataactgttaactgtgacaatgcctttactcaaagttaagaaaaatactttttaggattaaaaacaattcttcaaaaagttaaatctttaacacttaatgtgattagagaagtgttgctttaaaatacttatattaatcaagcatttttcatgtttaaagcaaagttctaaccttaagaagctgataatttggaacccataagtcaagtgttgaaataactgaaataaaacaaagactataaatgatgtagaagtagaaagaaaacacactggtgtcaaagagaaagctctcatgtagtaaagaaggctaggaaaacttacgaagcatggggcatttgagttggattatggtatttagaccagtggaaatggaagggggcactccaggtgacgggaaaagcattagcaaaggtctagagatagaaaagcataggatataataggaagtgaccaatttgtttggaataaggtatcgagaacagtgagagatgaggcttgcaaccaagataaagactaaagaatgcaaaatgttgaatgtcaaactaaagtattttacattccattcagagagcatcatgaagttctttttgtttttggttttgttgttgttgttgttgttgttgttgtatttttggtagagatggggtttcaccacattagccaggctggttaactcctggcctcaagtgatctgcctgtcttggcctcccaaagtgctgggattacaggtgttagccactgtgcccagccagtatcatgaagatttttgaactggaatatatttcagaaagattccattgtagagaatatattactagtgaactcatggaaaggaatttgacatcagatggtagtagttctcatgtggtaattaagggaatgtgtaatttctgtgagtccacaaattctctttgctcatgccaaagggtgctgactactgattttttatgtgtgcatctttatttttattattttaagttccagggtacatgtgcaggacatgcaggtttgttacgtaggtaaacatgtgccgtggtggtttgctgcacataccaacccatcacctaggtattaagcccagcatgcattagctatttttcctgatgttctccctctccatgctccccctcaagaggccccagtgtgtgttgttcccctccctgtgtccatgtgttctcgttgttcagctcccacttatgagtgagaacatacggtgtttggttttctgtttgtgcattagtttgctgaggataatgacttccagctccatccatgtccctgcaaaggacatgatctcattcctcttatggctgcattgtattccacagtgtatatgtaccacattttctttatccaatctatcattgatgggcatttgggttgattccatgtctttgccattgtgaataatgctgcagtgaacatatgcatgcatgtatctttataatagaatgatttatgttcctttgggtatatacccagtaatgggattgctgggtcaaatggtatttctggttctaggtctttgaggaagcgccacactgtcttccacaacggttgaattaatttacattcccaccaacagtgtaaaactgttgctatctctccgcagccttgccagcatctgttgtttcttgactttttaaataattgccattctgactgacgtgaaatgatatctcattgtggttttgatttgcatttctctaatgatcaactactgatctttttactactacagctttccaggcatttaaagttatattaatatgggtaccacagaatacaatttagacatttcacatttaccattttctttgtttagaatggatggctcactggaatgccgtctttgacctggcctgggttcctggtgaacttaaacttgtaagtgactttatttcattaggatctgggtaaatactgataagggagtgctttattaaattgtgtttaccttatttttgaaaggttacagcagcaggtgatcaaacagccaaattttgggacgtaaaagctggtgagctgattggaacatgcaaaggtcatcaatgcagcctcaagtcagttgccttttctaagtttgagaaaggtaggtttgtgcttatcttctttcatctccttaaccttctttgcagttgggagataagaacctgtaattgtttctaccctttcccctgtcaaagttactgctttacctacatagatgattaagattctttttttggagacagtttcgttctgttgcccaggctggagtgcagtggcgccatctcggctcactgctacctccgctgcctcccaggttcaagtgattctcctgcgtcagcctccggagtagctgggactacaggcgcacatcaccatgcccagctaatttttgtatttttagtagagacggggtttcaccatgttggccaggctggtctagaactcctgagctcaggcaatccacctgcctcagcctcccaaagtgctaggatcacaggcgtgagccgctgcacccagccaggtgattaagattctaacatgactgaaaaccttaataaaattaaattggttttaggcccactcttctggacattatctctagcttgtccctgaaagtcaagagtctttgataagtttttctgtaatcttgcacataaggtaaagatttataaacagctacaataccattgttcaaccttgattgttcattgaagttaaaaccttgtactgggcactcattaactatttgtaaaacagagttactttaactctgcttgtaaaatctaaatgagctataaggctgataaacaacataatttttttctacctaaaaatttatcatgtatttggtttaaatggcctgttttttgttttttgtttgtttgtttgttttttgagacggagtctctgtcacccaggctggagtgcagaggctcgatctcagctcactgcagcctccatcccccgggttcaagcaatcctctccctcagcgtcccaagtacctgggagggattacaggagcctgccaccacgcccagctaatttttgtgtttttagtagatctggggtttcaccatcttggcgaggctgatcttgaactcctgacctcgtgatccacctgcctcggcctcctaaagtgctgggattacaggcatgagccaccacacccggccaaatggcccaattttctattatgttttcaactattacttaaaattgattttcctatgtttatattgttataatggacaaggaagatttaagagttatataacacagcacagtactgtagcagctagggaaaaacttatcagtggtgtctgaataagctcttcatttctgtttttgtttgtttgttttctccttccatttgtttctcactaaataattttttttaaatggaccaacaaacatttctctcaaaggagtctctgaagtaatctgactttaatctctgaataatagtgacagacattacaatctcctttatcactaaaaaaaaaaaaagtactctgttttaaaaatcaaatgttttcatttattcacctgagccatttaggaggttaagctggtttggactggttttttgtttgtttgtttgtttgtttgtttgtttgttttttgagacaaagtctcactctgttgcccaggctggaatgcagtggcgtgatcttggctcactgcaacctccacctcccaggttcaagcaattctcatgcctcaacttcccaagtaactgggattacaggcgtgtaccaccacgcccagctaatttttgtatttttagtagagacagggtttcgccatgtcggccaggttggtctcgaactcctaacctcaagtgatctgcccgcattggcttcccaaagtgctgagattacaggcatgagccaccatgcccagcctggcttggacttttaagaaagtcggttttaatttactgtggttgcagttgaaactggaaccttgaaggggaaatatggcatgatttttcttatttctgcataactttattaacatatttaagtagttaggtatgcttgtgttctagttttctacactcttgtgtcatagttcactctgagtttgtaaacataattttaagataatgaaaatttacctaactaaagagtagtggaaaacatatcttttggtccttttgcttaatttttacaactctgcatgtgaatcagcctgtgacaatgagctgtagaagaaaaggcactgagttagagattggggcaggtggcttttttcatgattttcagtagttcataggtactctagtgtaaattagtctgatcggatactgctcccaagccctgtggtttgttttgttaaaacagaatagataatagctccactcactccatcagccataagccctcttgcagggcaaacctttgcaactaaacatggaagccctctgttttattctggcctcctgggcaaagtgattttaacctccttgggccttcattttctaattttatgagataaatacctagtctatttaggtcacaaaaatattgtagacataaaagtgaggtgaaatatgaatacttttttttttttaatctgagctcattatggtggctcatccctataatcccagcaacttgggaggctgagaaggattgcttgaggccaggagttcacgaccagcctgggtaacatagtgagaccctataagaaaacagaaaattagcttggtacagtggtatgcacctatagtccgagctacttgggaggctgaggtgggaggatcgcttgagcccaggagtttgcagctgtagtgagctgtgattgtgccatcatactctagcctgggcaatagagtgagacccagtctcaaaataaattaattaaatcaatcgatctatctataatcaatcagaggaccatataaatacttagtgttttgtgggggtttttgtaggtagtatggtagaaaacatctttggtccagttccttccaccctacataggtaggatacaaataatcctaactggacatagtcacactaatggaatttgccttccctaagtatctaccaactaaaagcaaagaaaatggactcagataagtgctttgtgtggcaaaagggcaggtattagaacttctagtggataattaaaattgattataaatttatttcctctcctacaaacttacctatatttacaccttctttctcattcttcattctcaagttttaattaaatgagaatctcttgcaagtgggccaggcatttattttttcaaagttcctcaagggatttcaatgtgtagctaaaattgagaaacattcttgatccttcccaagaccttccaccatcacatgtatccccactaccctgtatcttcaagttctccctctctattggctgtttctccttaggagaagatatttggcctattttcccaaatatcttaaccctgtgttctcttttagttgttactgtttcatattttccatctcctttaatttggtttaatctattttccacatctagccctcttcctgaaatcactcttgctaaggttattaattatctaattatcagaaagcacgaaacttttcaggtcttttcttctgcttgtataatatgttacacttttggtcttttatagaatttcaataaaagtctttgcttagaatctgtgatatcccactccctctggtactccttctgtccttctctttattctttcatagttgcttttacctaggttgaagtgttagcaaggcccaggatttggtgtttagcctttttttgctttcaacctataccttcttggacagtttcatctgtaccagttttgttttgtttttcatcctacttgtgttgacccagatctatattcctagccttaacctttctgcaagtacttcagattcaacatatcaaaaagtgaacccacaattcctccctgaactcatgatttctccctggcaatgccatctttttcctctcctctgatatcatttccttgaacaacgtatttaacttttcttatagtgtgagtctgatggtaataatttaccttagtttttctttacctgaaaatgtccttatttcatcatcattctcgaaggacatttttgttggatatgaaattcttttttttttttttttttttttttttttttttttttttttttttagcccagaggtcctttattttttttttttaacacctattatgccatgaattcatagggaataggttccagcagctcaggctccttcccattggttctcacaaagtgtgcttctctgggtggagcaggctggcgctttagttgaacccaggtacctttctctttggcttctttctttttctgatcattttccttcacacgtttcaggaagctatctcggctcttagaatgcttaatgtgctcaatacgcacattaattctcttggcaagaatcttgcccttaacttgtttgtttacaacaatgccaacagcatgctgggtaacattgtagactcttccagttttgccatggtaacacttgtggggcattcctttttgaacagtacccgttcccttgatgtctacaatatcacctttcttatagattcgcatatatgtggccaaaggaacaactccatgttttctaaaaggcctagagaacatatatcgggtgcctctcctctttccctttgtgtttgtcattttggcgaattactggaagatggcggttccggccgaaaagaagctggatatgaaattctgggtcaacagcttttttttcctttcattgctaaagttgttccactatcatctctgctttcattgagaactctgtggttgttaaaatcatttccctgtatataatatgctgtttttcctgactattttcaggattttttgtctttggtttctagcagtttgactgtggtatgtctagtcatggttcccttcacagttttcctgtttgaggcttgttttagctttttgtatttgtaaattcctttttactgaataggaatttttctatcatttcttgaaatactttttctgggccaggtgtggtggctcaggcctgtaatccaagcactttgagaggctgaggcaggcagatcacctgaagtcaggagttcaagaccagctaggccaacatgatgaaatcccatctttactaaaaatacaaaaattagccaggcgttgtggtgggcacctgtaatcccagctactcaggaggttgaggcaggagaatcgcttgaacctgggaggcggaggttgcagttagctgagatcgcaccactgcactccacactccagcctgggcaacagagcgagactctgcctcaaaaaaaaaaaaaaaagaaatattttttctgcctaatttattcatattctctctcctccctgcttcttctgttaccttaattacccatatatatatattttttttcaattactcatgtatttgacttttctaaattatcccatgcatccttgaggttttgttttttttcagttatcctaaacttaagataaaatgaacaagccataaaattcatccatttaaagtacacggtttagtggtttttagtttattcactaagtcgtgcagctatcaccacaatctaaatttagaatcttttcatcagtccaaaaagaaacttgaacgcattagcagtactttcacccattccttccaaccttatacaaccactatagtaatttcggtctctatagatttgcccattatacacatgcatacaaatggaatgatacaatatgtggtcttctgtgactggcttctttaatttagcctaatgttcagttctatttttctctctcttcttcaaattgaatgatttctattaatttgtcctaaagttcactttctctattttctccagcctgttcttaggcctatccagtgatttttttttttaatttcagatactggttttcagttctaaaattttcttatgttttttttaagacagggtctggcactgttgcccagattagagggcagtagcatgatcataggcacatgccaccatgcctggctaatttctttttgtattttttgtagagatggggtttcacccatggttggtcttgaacttctgggcccaagggatctgtcaaccccagcctcccaaaatgctgggattacaggcatgagccacagtggctgaccttcatttgtttgtttgtttgtttgtttcctgctgagatttatcatctttttattgattacaagtgtatatatttttttcttcctttttttgttttttgttgttgttgttgtttgagacagggtctcactctgtcacccagtttggagtgcagtggcgaaatctgctcactgcaacctctgcctcccgggctcaagtgatcctcccacctcagcctcccaagtagctgaggctataggtgcatgccaccacacccagctaatttttgtattttttgtagagatggggtttcgccatgttgcccaggctaagtgtacgtttctttaactcatttaacatggttatgtatcctttacaaccttatctgataaatcaatatctggattatcttgggattggcttccattgatttattttcccttgagaattattcgttttcctggctctttgtaagtcaagtaatttaagattatattcaggacattgcgagtggtatgttggattctagattctgttatattgcttagaaaagagttggtgttccttttttaacaggcaattcacttgtttggatccaaattgaagactgtcacacctacaggagggcagtggatcttatctcaattattttctttagtttaagcctcagctgcaaactgctttcagtttctcttgcccatatggtacaggggtcagccagagacttggactgagtttaaacacggaatcatgggttccctttctctagctgtctccaggttttccccatcccctcactctctgactgttcttgttgctcccagtctccttttccttgttcttctggcttgaaagatggcagattttttaatttgcattttagctgcctggtattaatgctgcaactttggctgtcctcaaggtaaaaccacacacacaaaaaaaaaaaaaacaccaaaaaacccagtaacttaatctcaggccaatcatttgctaaagatgttgactctcctccaaaaattgcatgtttaagaggaaagtgggccaggcacggtggctcatgcctgtaatcccagcactttgcaaggctgaggtgggctgatcacctgaggtcaggagttcgagaccagcctggccaagatggtgaaaccctgtctctaccaaaaatataaaaaattagccgggtgtggtgacacatgcctgtaatcccagctactcgggaggctgaggcgggagaagcgcttgaacctgggagacagaggttgcagtgagccaaaatcgtgccactgcactccagcctgggtgacaacgagacaccacctcaaaaaaaaaaaaaaaaaaaaaggaggaaagtggtaacttaaagggaggagtaaattttatccccaaacaacagtttctattttaggcggagtaaattccaacaaaaggggaaaaatgaacccgagtgacattctgtacaaccaaagctgttaaaaggaatgaatagtgcctgacacttaaaaagtgctgaattagatgaatggtttcaacatggctgactagatgcatctggtactcacctctttcacagagtggaaccaaaatagtgagatattatagtgacagtgagatcgtagataatcacccttcaaatagatcatctaagagagaacactgggattcaacagagaagtgataagaagctccggaagcaaggaaggagagaaaagtaaagcagcctgtttggctgggatcagctaggaatctggagaggcttcctatgcagggacagagtaagtgggagacccccagcagcccaaatacccactgtgaaccctaataatagccatgggagaccccttgatgctcacggaccctgagactaacatagggagctgcctggagacttcatgaaggcattgctccagagagatatcatactgggtcccacaaaccctcaagtcctaagcagctgtaacactgattttcagagcccagcccccaccagactgtgtcctgccctgccacccaggctgaattgggagccacacacagcgacctcattcccctgagtggaggggcagctgcacattttcacactccccaaggacaaattccacttcctgcaaccaccaccactctgggctgctgcagggcagaggtgtaagcaaaactcagtcgtttaactgcctgcctatgggtactcccagggaaagcaaccccactctgcatgtcagtactgcagcatagctgctgctgccccttacctgagcattccactggaagcctggggatcaccccacccctgccttccatagccagcacctgcatgcaccaccagggtcactgagggcagttccacctagcctggcttcatacacgccactacccaagcacaccctctgggaggcctgaggattgcccagttcagttcatcaccagtggtgcctgagcactcctcctagagtctaaacttgggcctactcaatctgctgctaccaccatagctggcaccaacctgtacatgcaacctgcaagtctagggactggcctgcccaacctgtcacagccaccgccaacactagtacggaacacttgggttccaggggattttttcatcactgctactgtcatcatccacaccactccacacctcctgcccaggggctcaagaatttgcccacccacctggcccactgctgccatttccaatacctgagtaagtcatctgaaggcccaagaatctacctgcctggatccattaacaccagtgccagcgtatgctgccttggggccaaaggacacacaggctcagaccactgctgccaccactggggcctgaagactggcccacctggtatttcaatttctggcaaaacttaaccagtctgcactaaaaaccacactctaatctaccaacgaaaccagataccaatgactctatggccaaaagaaatgatagagactatgctactgcttgcatccagaaccaaagccaagtgtcctctccaaccatcaccatagatacatcttcaggaaaatgttctccactacaaaccaaattcaaaaaattggaaaaagcaactgttacaccaggtgcacaaatatcaacataaaaacacagagaaatcaaaaagcaaggatatgtgacacatccaaaggaacacagtaattcttcagcaacaaatcccaatcaaaaaggaattctcaaaatcctggaaaaatgatccaacatactgatactaaggaagctcagtgagagaaaagagaattctgaaagacaatacaaagaaacagaaaaataattgaggaaatgaatgaggaatctaccaaagagataggtatcataaaatagagctaaattctggaactacagaattcatttaatgaaatacaaaatacctttgaaagcttcaacaatagactagatcaagcagaagaatcccagaacttgaagatgttttgaagatcttttaaaataacctactcagacaaaaatagagaaaaaataataaacatgaatgactaaagctttcatggcatatgggacactataaagtggccaaatatatgaattttcagtgtcccagaaggcaaagataaaatgaaagggttagaaagcctatttaacaaaataataggtgaaaacttcccaagtctagcaagggatttatatatccacatacaggaggctccaagatccccacatggatataattcaaaaaggttttttttccatggcacattgtagtcaaactcaaaagtcaaagacaaagtgaaaattctaaaagcagagaaaaaacatctagtcacctataaaagaaaccccatcagacctaacagcagatttctcagcagaaatcttatagttcaggagagaatgagatgatatattcaacatgcttaaagaaaaaaaaaaaaacctgccacccaagaatactacacccagtaaaattatccttcataaataaaagagaaataaagtctttcccaaacaagcaaaagctgaggaaattaatcaccagtagatgggccgtacagaaaatactaaaaggagtcttataccgggaagtgaagagcaatatttactgtcatgaaaacacaagaaaatataaaaactactggtaagcaaacacacaaacaagaaagaggaaaggctgaaatgttaccactaccgaataccatgaaaccataatgataaaaagtaccagagaaaggaaggaacaaaggatatacagaacaaccagaagtcaatcaataaagttaggaataagccttcacatatcaataacgttgaatgtaaacatgttaaactttccatttgaaaagtacagactgggcaaatagacaaatgtgacctaattatatgctgcctacaagaaacgcatctcacctgtgaagacaagtataaactgaaaataaaggaatgtaaaaagatactacatgcaaatggaaaccaaaagcaagcaagaatagctatacttacatcagataaaacagactttatgtcaaaagcagtaagaagaaacgaaggttattctatgatgataaatcagttcagccaaaggatatatcaattgtaaacatgtatatacctaacactggagcacacagatatataaagccaatactattagatctaaagggagagactccagtgcaataacagttgaggacttcagccaccccactcagcgttagacagatatctagaaagaaaattggatttaaactgcacattagaccaaatggacctaagagatatttacagaacatttcatccaacagctacagaatacacattcttctcatcagcaaacagaatattctccaagctagaccacatgttaagacacaaaacaagtctcaacacatttttaaaagttgaaataatatcaggaatcttctcagaccacaatggaataaaactagaaatcaacaacaaaaggaagtttggaaactacaaatacgtggaaattaggcagtatgattatgaatgacttgggtaaaggaagaaattaaggaaatttttacaattcttgaaacaaatgaaaattgaaacccaacataccaaaacccatgggatacaataaaagcagtactaagaggaaagtttatagcaatacacacctataccaaaaaagtagaaagactttaaaagaatctaacaatgtacctcaaggaactagaaaagcaagaacaaaccaaaccccaaattaatagagggaaataataaatagcagagcctaactaaatagagacttaaaaaaacaagaaaaagggtcaacaaaacaaaaggttggtttttggaaaagataaacaaaatcaataaggtacttgctagactaaccacgaaaaaaaagaaagatggtcttaaataaaatcagaaatgaaaaaggaaacattgcaactgataatacagaaatacaaaagatcatcagaaactattgtgtacaactatacactaactagaaaacctagaggaaatggatagattacaggacacatgcaacctaccaagactgaatcagaaagaactaggaaacctgatcaaatcaatagtaacaagatcaaagcaataataaaaagtcttccaacaaagaaaagttcaggaccagatggcttcactgctgaattctaccaaacttttaaagaactaacaccagttctcaaactattccaaaaattgaaaaggatgggaattctccctaactcattctacaaggccagcattattctgataccaaaaccagacaagcacaaggacacacacaaaaaaactacagaacatacggacatagatgcaaaaatcctcaacagaatactagcaaactgaattcaacagcacattaaaaaaaaaaaatacaccatgatcaagtgggatttatcccaggaatgcaagaatagctcaatatagacaaatcaataaacatgatacatacgtcatcaacagaatgaaggacaaaaaccatatgatcattttagtagatagagaaaaataattcgataaaattcagcatctcctccgaattaaaaaactcaaccaactaggcatggaaggaacatatctcaacataaaaaggctgtatatgacagactcacagttaacaccacactgaatcgaaaaaagctggaagcctttcccttgagaactggaacaagacaaggacgcacgcttttcaccactcctattcaacatggtactggaagttctacccagagcaatcaggccagagaaagaagtaaaaagtatccaaactggaaaagaagttgtattttccttggctgatgttatgatcttatatctagaaaaacttaaagactctacaaaaaaaaaaaaaaaaaaaaaaaacctcagatctgataaattcattaaaagttgcagaatacaaaatcaacatacaaaaaaaatagcatttctatacatcaataatgaattagctgagagagaaatcaggaaggcaatcccatttacaatagctacaaaaaaataaaacacttaggaataaatttagccaaagaggtgaaagacctctataaggaaaagtatgaaaccgatcaaagaaattgaagaggagacaaatggaaagagacctcatgctcatggatgggaaaaaattattatttttaaaatggccatactaccccaagcaatctacagattcagtgcaatccccatcaaaataccaacatcatttttcacagaagtagaaagaacaatcttaaaatttatgtggagccaaaaagaacccaaatgccaaagcaatcctaagcaaaaagaatatagctaatataataactaaaacagcatggcataaaaacagacacagagaccaatggaacagaatagagaattcagaaataaatccatatatttacagccaattgattttcaataaaggtgccaagaacctacaataaacggtgctgggaaaactgggtatccacatgcagaagaatgaaactgtacctctatctcactatattaaagaaaatcaagataggccagacatggggctcatgcctgtaatcctagcactttgggaggccaaggcaggtggattgcctgagctcaggagttcaagaccagcctgggcaacatggcaaaaccccacctctactaaaatacaaaaaattagcttgacgtggtaggcgcgcctgtagtcccagctgcttggaaggctgaggcatgagaatcgcttgagcacaggaggcagaaattgcaatgagccaagatagcaccactgcactccaccctggttgacacagtgagactcagtctcaaaaaaaaaaaaaaaaaatcaagatggagtataaagacttaaatgtaagacctgaaacaatagaactactagaagaaaacatagggaaaacacttcaggatattggtttaggcaaagattttatggctggccaagaactcaaaagcacagacaacaagaacaaatagataaactagactatactaaactaaaaagcttctgcatgccaaaactttttgaatgggaagtatttgcaaactatttatctgataagggaataatatgtagaatgtatacaaggaactcgaacaactcaacagtagaaaagacaaaatattaaaaagtaggcaaacacagactgggcaatgtgccaaaactgtctctacaaagaaatacaaaaaaattaactgggcatggtggtgtactactgtagtcccagctacttggtggggctgagatgagaggatcactgagccctgagcggtgattacatcgctgtactccagcctgagtgatagagtgagatcctgtctcaaaaaaaaaaaaaaagtaggcaaagaccatgaatagacatttcgcgaaagaagacatacaaatggccaacaggtatgtgaaaaactgctcaacatgactaataaccacagtgagatatcatcttaacccagttagaatggctattattaaacaaaacatgctggcaaggatgtggagaaaagagaactcttgtacactgttggtggaaatgtaaattagtccagtcactatggaaaacagtaagatttctcaaaaaaaaaaaaacaaatagaattaccattgatctagcagtctcattattgggtattgattcaaagacaaacagtatatcaaaggaataactgcagtcacattgttgcagcactattcacaatagccaagatatggaatcaacctgtctattaacgaacaaatagagtttttaaaaatgtagtatatacacaattgaatactatttggccataaggaaatgtcattcacatcaacattatgttaaacaagccaggcacaaaagataaatttcacatgttcccatttatatgtgggtgctaaaacagtatcatggaggtagagagtagaatgataaataaccagaggctggaaagtgagtgggtgtgaggggggaatgaagaaaggttgcttgatggatacaagcataaagttagatagaaggtgtaagttccattgttcgatacctgactattgtcaccttacaaattattgtatatttcaagcagctagaagagagaacttaaaatgttcccagcacatagaaatgatgaatacaaggtgatggataccccagataccctgacttgatcataacacattctatgcaggcatcaaaatatcacatataccccataaatatgtaaaatactatgtatcagtaagaaaaattgcatgttttcattcagtttccacagagccctcaggtagctgtttttgtgttttatcccatgtacaactaatgcaagtggattagtttaagtgctcactctttcacacaggaagcagggtttttttctggcttaattttaaagaataaaacattacagataaattgaagttctcctatagtgccttttccaatcccattgcatcccaggcaacctctttaacaaacttcatatggatctggtccatatttttatactgagccaatacagtttagaggtttggagtgtaagctctggattcatactgccaggaatacctttacaagttacttatcctctctgtgcctctcttggtacttacctaataaggttgatagcaaggattgagataatttttataaaacacgcgggatagtagctaacatttagaataagaagcactctgtattttgactcttgattgttattcttattacaactgtactatatattttatatgggttttaaaaaatttacagaggggtgattctatgaagttttggttcaacattagcatctcaagctcttcataatcctttttcctatttgttattgagccatatatttttaaatgtttgatctccagtgacagatacagtacctagcacataatagatagtctacaaaatgtaaactgaaatatatgtgtcattgactggttttgttaacctcttaataatctgtttatttccccacagctgtattctgtacgggtggaagagatggcaacattatggtctgggataccaggtgcaacaaaaaaggttatctagatctattttaattttgagagatttgggattaccctgtacttaattttgagtgaaagagttagtgatttcatctgattaccaccagggggcatgtactcataatttcccatttctgctcactgttccagatctcaggatcttcactgagtgtcctgagtgataaatacatgagtgtcactgttacaagtattacactcatgtatttatctcatattgtcttctgaattataatgccatttacccacattattgatggacttaaaaatattaatacgcagcctcactggtaaatgtctttattttggtttttaagaattttttttattttattattattattttttttttttttgagatggagtctctgtcacccaggctggagtgcagtggcgtgaacttggctcactgcactccccacccgctgggttccagcaattcctctagctcagcctcctgagtagctgggattacagccacccgccaccatgcctggctaatttttgtatttttttaatagaaatggggtttcactatgttggccaggctggtctcaaactcctgacctcaagtgatctgcccaccctggcctcccaaagtgctgaaattacaggcgtgagtcaccaggcccagcctgattttaaagaattagattgaattaaacataagctcatggttgtctcatgatgctattaagcagacgatgattatctcactgttcacttttagttaatttattaaaatttttttttgtgtctgcattttaaaaaattggtaacatagttctacatattttcaggggtatatgtgatatcttgatacatatatagaacatgaaatgatcaaatcaggataattgggatatccatcacctcaaacatttatcttttctttgtgttgggaacattacaattcttctcttctggttttttgtttcttgttttttttttttttggagacggagtctcactctgtcacccaggctggagtgcagtggcgtgatctcatctcgctgcaacctccgcctcctgggttcaagtaattctcctacctcagcctctcaagtagctgggattacaggtgcatgccaccactcccagctagttatgtatttttagtacagacaggatttcaccatgttggccaggctgatctggaactcctgacctcaggcaatctgcctgcctcagcctcccattcttctagctattttgaaataaataataaaattatttagaaaaattttaataaaccttattttgtagagcagttttaggttcacagcaaaactgagcagaaagtacagagagttcccatatagcccctgccctgcccacacacagacttccccactgacaacatcctgtgcctgagtggtacatttgttataatcagttaacctatgtcaacacatgctgtcactcagagtttataatttacatcagtgttatatattcttagtattacacattctgtggatattgacaaatgtgtaatgacgtgcgtccaccattgtagcatcatacacaatagtttcactactctagaaatcctctgtgctccagttattcatccctacctccctctaagccctggcaaccactgatcttattacttcccccagtcacatttcctccatgtcattttatggctttatcaagctcatttctttccagtgctgaataatattccattgtctggatgaaccaaagtttatccattcacctactgaaggacatcttggttgtttccaagttttggcaattattaaagctgttataaacatctctccctttttatacattatagtctcaccacaggagatgtagtgcagctggctctgctggcttctaatttcaccaacttggtcaaaaattacttaatattgaagttttatttacacatgttatattcagcatgtaagaatcctgaaacctaaatttccttggaatatctttcagatgggttttataggcaagtgaatcaaatcagtggagctcacaatacctcagacaagcaaaccccttcaaaacccaagaagaaacagaattcaaaaggacttgctccttctgtggtaaggttttacagatgtatacatgtgtgcagatcttatctgtaggatagaataaatgggaggctattgattaagtgaatgagaatcttcatgattctcatttgatatcagtggtttattgcttattcagtacctacatttgtggttctcaaattttaatttttggttcttctgaattataatgccatttacctatattattgatggaattaaaatatatgtagcctcgttgataaatatctttaaatttattttggttttaaagaattagattgaattaaacataagatgttgtctcatgccattaagcagaaagtggtttttttttttacaatttcaatatctacattttaaaaaattgataacataattttacatattttggggggtacactatgtataatgatcaaatcagggtaattgagatagccatcacttcaaatactgtgtgcatcagagttgcctgaggcacatgttgaaaattcaccttactcatccctaaaaatctctctacacacacagacacaaacacacacacacaaacacacccctatagtatagtggaattcattaggaaaagtgggggaggagtagtttgaagaagcatattaagtactgtgatgcagttttctaaggggaaagaatacctgttgttttcgtaatacaaactacagaaaaatatgttttttgttttgagacagagtctcgctctgtcacccaggctggagtgcagtggcgcaatcttggctcactgcaagcaccgcctcccaggttcacaccattctcctgcctcagcctcccaagtagctgggactacaggtgcccaccaccacgcccagctaattttttgtttttttagtagagacggggtttcaccgtgttagccaggatagcctcaatctcctgacctcgtgagcctcccaaagtgctgggattaccgatgtgagccaccacgcctggccagcttatttttaagcatttgacaaaatattgttaaatatattgagaaacacatgggtagaacatagtaccactctaataacttacagtcagagctcaaacaatgcccataatatatcctttttctttaaaaaattgccctttttctcactttaatgtaatttttttttcatattcctggtgtgtagggtacaagttaatattttgggggaagtatgactgctaagacattaagacttaaaactatacaccgtgaacaggacacaagcatgaatggaagcagatagtagaggccatatgaagttaaaacgagtagcatttcagacatttaatctggttctgagccaagataacttgttaagtaatagcaattaggaggtacgactccactgggcctctttttcagggcatgaaataatcttttattcataattcttttgatactcctatatgataatctaggtagacagcaacattttagagattaaactggcacaagaaagttaaataagtttcctaaggatacacacagcatattagtagggctgagtctaagtagatgcagtaggctcagacgagcaaaatcttttagtcaccagtttgttttttgagtataagttgaaatattaacactgtatactaaaacttaatgatccttgctaaaattacctcttggtcagcatatatatctgatcgagatcattagacaagacttcatctaagtcagtctggggagaaaagtcgttttttagcaccttgttcccttgatggtaaagattatgatgcccaagatagaatcttcttcttttcttgtgctatcaggatttccagcaaagtgttactgtggtcctctttcaagacgagaataccttagtctcagcaggagctgtggatgggtaagagtctatttcttttttcttccgacgagatcttttttatgagattgtgatgaggcagtcacatagtctcattataattgaatgtgtgtgctttcaactgtcaacatagcaagtaccccaactgaggaaaggagctatagatcacattggaaaatacctagttgaaggactcttgctggataattaaatgaaagaatacatgtgtcacgcttagcacattgtctagcacataagagcagtggtagctgctgttgctatcttagaaaagaagctggctgggtagcttgcttgccttatgcaatataatttagtcactaattctcattttgaagagtaaaatttctgttactttgggttttgtctttttcaggtttaagaatatcctaaaagaagaaatctgattctggggatgtaattgacatttctgggagtaatctaactagattgatgatagtaaggtctaatgactttcacatacctgtcatccatgattagtctgaattcttggcttccaaataagtctgctctgtgatgcttgttgattgtgttgtagaatattaattctatgcaaatggagactctttctttttaagtttccttcctattatatctctcaaggcatccttctcttaaaatttttaatttaaaagatgatggcttaccaaactaggatttccattgtgtcctctgggcactaaaaccctctgaaccaaattctcaggcaggaatgaaggattatctaaaggttattagttctgcttgtgaatgactgtgaaagcttgctctgtttgtttccaagaatactgtcatttcatagcaggtctgtgttttcaagttacctttatactagaagtagaggattaagacaattatctcaatagatgaaatgaaaaaatactttatttcacagaacaatttgtttagattatttaaagagttatgtatggagatataaccacagggacagaacttgctacttatgatatcaaaaatatatgcagaatattaaaggcttaggaagtgtattttctaaaaacaatggaacaattactatcggcactcaaccttcatcttccttttccgttctcttagagtaaactccagtaacccatcactgggtcaaatcacatctgtttccgttctgtcagaattataagcctgatattggagacaacagtataagatactttaatttgtttcccaatgaaatatccttactgtacctagttaatgtgccagaggagttagattaaaagtcatttcacatttagtgtagttgaagttgtttggggttggaagaaggtctacaaaatatttatttgccttggtttttaggataatcaaagtatgggatttacgtaagaattatactgcttatcgacaagaacccatagcatccaagtctttcctgtacccaggtagcagcactcgaaaacttggtaagcctttaataggtcttttgggggagataagagtttttgtttaaaaaaaaaaaaaaaggctaatttccagtaacattgatatgaaaaattctaatatgtgaagttcaaaagataaaaactcagaagaatgtttttggtttgtgtatattttggggacaaagaattctgatgatgattcttatgaaatgatctatttttgtctctacattttaacctcagatctactcaccatcatcaggacgtgctaacttaagtttcctttttccaggatattcaagtctgattttggattccactggctctactttatttgctaattgcacagacgataacatctacatgtttaatatgactgggttgaagacttctccaggtaagatattagtcattcaaattctcttaccaggaaagcattatgggctttttttggtaatgataatttaatgggctttcttctaaactgaacttattaagccatatgaggactttggcatctttgattacatccagtgataatttcataagtgtacattccttgtgatgatttcataagttagctgaattgtgctttacatggtgactttattttaatagagagtatctcctgaaattatgccctttggcctatatttagaattctctcaattttttatttaataagctgtggagtagataaagtgcttctgctcagcttttttcctctttaggggctgctggttaaaattagggggctgaaattttcatacccccaaaatagtttcagcctatctcagccttctccttaatgttagaggcccttttatttctagatgttttccccagcctcaccttttttttttcctcaaaactttaaaaatagaatctgatacttaaaactaataaataaatgatagttttaaaaagaaaacccaagtttctcaagcatgctttcctcttttttttaatcctctcccctccctcttccaaatcaccagcctcaggcatgctttaagagagttatttgggttacattatttttaagaacatcaatttcttaagcaacatcttagtagcctggttattcctcatctatagatctttcaaaaacactttgaattccataaccaatcctcagagttacccagtttccactaaagtaaaaagtgctgataaacaagaaatctcaagtacagaacttgttttattttatttatagatagatgtagatatagatataaatttttttttttttttgagacggagtttcactctgttgcccaggctggagtgcagtggttcgatctcggctcactgcaccctccgcctcctgggttcaagcaattctcctgcctcagcctcccaagtagctgggattacaggcgcccgccaccatgcctggctaatttttgtatttttagtaaaggcagggtttcaccttgttggtcaggctggtctcgaactcctgacctcatgatccacccacctcagcctcccaaagtgctgggattacaggcgtgagccaccatgcccggcccagaacttgtcattttagctgagatcttacagaattttccaaagatcaccccaagcaatcttattaggactttagtatcggtggcagcatcatagtctgcatttctgatactttgcactgggtctagttttctctaaacaggagcaatagtatttagaaaagggaagaggtgtttcttttgctattttccttaatggaatctgagcttggagagctgctaatttagttagtcaaataaaatagacttttcaacatctttccttgaaagataaagcgtgatcctgattatattatcagatgtacaagagctctttctatataatttttgctacagtgtggcactgaaaaggtccttgagtttagtgtcctgctgtccaacacttcgctaataatttagtaaaccttttctatgcttctatttaatttcatttgcgcagatggatagataggtagataggttaatagatcgatttattccttaaaaattgaatgacagctggccatggtggctcacacctataaacccaagccgaggctggcagatcacttgagcccaggagttcgagaccagcctgggcaacatggtgaaacctcatcttgacaaaaagatgcaaaaaattagctggatgtggtggcatgcacctgtagtcctgctacttggaaggctgaggtaggaggattgtttgagcctgggaggtttgagtcttcagtgagccatgatcttgccactgcactccagcctgggtgacagagtaagaccctgtctcaaaaaaaaaaaactgaatgacaactgtgtgtgtgtgtgtgtgtaacgtcttgtaattacttgtccttttcaaaacttctgaatcgatcttggattcgatacttgatctaccatgctttgtattatggtgtttatatgttcataaggatgacttggttggaagtacttgaaaagcccagatcaccaaagcaagattaaattgagctcattaaagccaacatacattttaggaggatttttagcaaggtttaaacatttacagtgcatatcataccagcctttcttagaccagcagagggcaataaatacttacaggtgtagtgggaaattcaggctagagttttccattcatagttgagagttgaggaagattaaaaattacagttttagaacaatgttcagaataaaggagcttgtttattttgcagtgataataggtgtatacaaattgattcatatcctgcctcactttcacagtaaaaatgtctgatgtgaggagtatttgctatgcctgcatagctttttcctttaaagctataaatacaaagttcttttccagctttattctagaaaatggaagagattcctgtgagcacttatgggaagctgttaagtcccctactaatacttttctctctggagtgtgattgttttttcctgcctaaaggtatccttaaattctccaataattgagatttttctcttgtatttcctagtagtgttctgatgtcagaggcctcaggttttgaccttcttaggatagaagaacctgttaagaacatatgctagattgggttacctgcccttttgccattgagagtgagaaggctaaacctaatctagtgccttacatataaacagtttactccactagctcttccaccattcagtctactcaaagtgctggattaaaatgattctcacatcccacataagctattagtaagttttaaccagaactcaaatgatacttttcactgattttttttttccttttcatggaacaaatgtttgaggatctactctgttcaaagcactataaagtctagtgaggaaaaagtaagatataaaatttatcctcaagaggcctgaagtctaaggggaaattagatgaatatattatgcagtggaaaaaatcctaccctgggctggagagagagggtcttataaaggcattttactgcaagttggacattggctggattctttttttaaggaatgttttccctccaatttttttctcttgatattgccattttcgtaccaagtactcagactgagttcatgagattggatctaatataaagcttccttctagggttttgtttttctgccaatgtctagttcccttgtatttgatggataaagctagatcatctgcttcaataggcaatacagtgataaaacttgttagaatatatatgctgtctatatccatttgaccactagaaataacaagagccaagtaatttggtttttttcctctggcagtggctattttcaatggacaccagaactctaccttttatgtaaaatccagccttagtccagatgaccagtttttagtcagtggctcaagtgatgaagctgcctacatatggaaggtaagttgctaaacttcacccacaagtgttagactgaagtattcttgcaaatatttgttctgtccaatatgagataagtttaatgtaaccacgtgctatactattcctgcatcagatatttagtaaaggttgctcttggctcttaatatagctgaaaccttactctactacagaatgtatgacactttcagggccatagcttgtcagaaattgacaatttgtatcctctgtttcaaaaattattaggaaattgagaattcagagggtgataagaaccttaactactttgtcctgcatcctggaaaacatgctatactgactttctgccctatgttttcaaactctcgttcagaatacagtattttgatccctaggatcctgtgcttgaatcacccatggagccttgcacaaaacagaaactcaaaaatatttttatgattaatttattctttattctctccttacaagtagctgatcttcaggccactaaagtagatatggctgctttatcagatttttatatatttaatagcattatttactaatcttttttttttttttttttattgagatggagtctcactctgtcgcacaggctggagtgcagtggcacgatcttggctcactgcaagctccgcctcccaggttcacgccattctcctgcctcagcctcccgaataactgggactacaggtgcctgccaccacgcccggctaatttcttttgtatttttagtagagacggggtttcaccatgttagccaggatggtctcgatctcctgacctcgtgatccgcccaacttggcctcccaaagtgctgggattacaggcatgagccaccatgcctggccaataatcttttaaataacttttttaataacagtagttctaaagtgtctactgtaagctaagaaatttaaagctgtccatttgaagtccagtggagaaaataaaaatgttagacaacaggtagcacttgcttattactgaaaaatgtctcttgaaggaataattaattatggaaatgttctgggaattcagagaatgatcattaaggcattgtttacccatgactaagaattaattatcttctagatttccctgtaacttcataaatgtctttgacattggtgaattgaatgattagagttcacatattttgggttttaaagtcataatgtctaaaacttcatagatcccatagttccgatagtatcaaatcccttctcaagagaaagttatatcattttttatcctgccaagctctagaaagtaatattgctaattttttttaggacaggggtaaaacctgtttagtatgaagcataattcttcagcttaatttcttccaatcctgagggaagtacaaaagaaaagtgatttctatataactggagttgtgaaaatgcaacactactttattaaaattttactaacaatatcctaaatagtcacagggtggaaatattgctctatccaagatgcttctatgttgggcctgcctttttctacaagcatatttctttcttttgttatatttttaaatgcctataaagtatatacttgactccatcacaagatggagtttcctctttataatattcttcttacttgagattttaagtttaacaatgttatgtcgctggcactaatgctctgtcttatatttaaaattttcagtttcaaatttggtcttaatgcttattttgctacctttttcctttcttctttgctcactgtcttgcctatgtttccttctccactttggctcccaacttaactagaggattttattcctaccacaggtctgtatcttttaaggtttgtttcttgttaaaaaaaaaatttttttttccaacatcacaaaaagcatataagaataattcaaaaaatacttatgtattgatcattcttgttaaattattaagttttaattatatgtacataattatgtatacaattacatgtgtgttgtatagtttcttgatagtttttaaattcttaataaatttttaaattatatatatacataattatgtgtataattatatattatgtgtatcttgtgtaaagttttcttgacaattgttaaagttccttcctcttctctagtgcaaaggcctttttaagattttgtttcagggaatgaaggttgtgggaatacttgcctttaaagatatacactaaatatagttggccattgtttctaagccattttcagacaaccaatcagtgtctaccacatacaagggttacccttttttaattcctaggctgggtcacatgtcagtgttgaatgacgtggttcagacgtgatgttcttctgcctgtccacacataactcggtgtacaggctctgatatttgagatcctggcaagcttgcacctcctaaatttgaatttgcctagtgaggtggctcagtttctcttttccatgattaaaaaaaggaggagtggtattttaagagcaattccattcaagctgagtatccaggctgttagattgctcttctacgtgttcaaaaagtcagaattctcttaagtattagaattttttctatgctaaaaagccaaaagcccatgggcacaagaaaacaaaatagaagggagttttgtatcttaagacagaagagaatggcctcttaatcctcactactgcccagcaaagaggaaatataatatattcgggctgatattgaggcccaagacttaaaaagatttaatattataccttttctttttaatttcctaactattgtctcacccccaccccatcctcttttctctggtttgtttctgatatagccactgaatagcatcgaagtggttataaataaactgatttggcatagtcattctaccactgactggtgaaacgttgagcctgacactttaggaagtgtaaatgatctcatggcagaaataaagattagacttggtttccaactgggcagagaagagattttgtgaggaaaagtgctgatattctttgtatgtttcagtacacaaaataactttatgacatctgtaagttagagccacttacttctagaggtaccttcttagttctaggagatttaactttgggattccttgtgccttgaattaaagtctttattttacaaaaagtagaatatgtaagagaggacagtcttctgtgtctgagcatctccaaaatgcatggatataaatgtctcttagacttaatagtcgccttcctacttaaaagggaaaggaagctttaaaaaatgaagttacgtaattatgatagtgttcttataataatgtagggacaataaataaaaatttatttgaataaaaatgaaggatttaaaagccacctgaatctcattagaaggaatgaatctttcttgaagtagtcatactataccctaggatagtcctaaactatcaaagcataaaagttcataaaaacgtgttagacattagtttctcattttaacccataacacgcccttcctcccatttttccttattcagatagaattcatataacatataattcaccattttagtcattttaaagtttacaatggagtagttactattgtaatcacagtgttgtaccaacatcaccactatctaattcccaaacatcatcacaccagaaaaaaacccgtgtcctttaacagtcactctctaatcccctcttcctccccaacacctgctaaactacattcagtctctatggatttgctattctagacatttcatataaatggaatcatacaaaatcagcattttgtgtgtgacgtcttttacttagcataatatcgaggttcatccatgttatagcatgtgtcagtacttactcctttttatgactgaataatatgccattgtgtggatagaccacattttgtttattcattcatcagttgatggacatttgagctgtttccattttttgacatgaataaagctgctgtgaacatttgtgtataagttcttgtttaacataggtttttaattctcctgggagtgtaggaacagaattcgattcctaagaatagaattgctgggtcatataattgtttaactttctgaggaaacttccccccacttttaatgctatgtaaagtgcctggcttagacttttactgtcgtcattgataccttgttaacgtattccaaaatgtttttctaatgggtctctttcttttttctctgaaaccctatagataaatgcaaaaatgtgcatatattctattggtgggtatttagggggttttttgaaacttattttaacccttggtgtacacatttaggttctcctaggtattataatacagaaactgagaaaggaccaatatcatgaaattaaaaagctataggcaataagcagggtgaatcaatggaagacaataatgtatttctaccagggatgctcagtaggacttgaggatttcctctcccttctaatttgctgctaccagacctgtttggaccttgggtgaagagaaacttaatcgactggggccatcccaaacagaggaggaaaggaaaatttctgtgactactgggatagttagagacgatcttcaaagtcttttctaaaatatgttacattgtgaaagaatgaattatctctgtgccattgtaggagtaggcagtaagtgagattcctgtagatgtggaaaaagcttcctttctgataaattttaattaactctgcaagacaagttagactctgctctttgtcttcttttgcttttttaattattgcatatgtaccatttaagccaagagaggagtattaatgattgagttgaataaccttatcagtcagtgtgtcagatctcttaaccataatctgggggaatctattaagtttacttagtcattctcacaaataatcattccagagtcacctccactttcttcatacaaatgagccatgattcagagcctcaggaaaatgaaaagagaataacttctctcagccccaacctccttgctcttttgaaacacacatgctaataatagttatgtgtgtttgtactcgttattgtgctgattaattcccatggcctatgaaagagattgacatctcttgaatgagtcagctgtatgatgctgtcaaatgtacataactggtggcatctgatgatggaaaaatatgattcttagtcacatgtacaggacagtacaatgtgacccttctttctgcattaaaatatattaaaatgcgagtgacacttacttgaaaattcaaaacttctctcagaaaattaactgaaatatagttttagaggaaaaaaatgtttttcagaaaggataccaaagtgccatgtaaaatatagtttataccccttcagaatgaaggttatccaactcaaaatgaaggagtataactttgggttttgtaaaagttagtgaccagctctgttgggacaagaggacggtcttcttttggaaggaagaccatcatcttgtccgaagagagctggtagcatgtttcagaaatcttcaggtttcacagttaatttagtgttcctagaagtagctgactagggatctgaagatatatatgctgtgtaaaaacaggactgagttgtcgagttgactacttaaggatggataacatccttccagaaagtttaccacctaaggaataagggacaatgccagtcttgaattttagtcaaaatatatatggctaggttgtcctgatatgaaataaggactatccttgtgtgtaagctcatgttatttacttattttgactgttttcattgtgttttctcagattagtaacagaaatatttcattgcccattggaaatctgttgttttttttttcctaactatagctaggcaggtctagtggcctttggtaacaatcctaaagctctctaagacacacttctgaattcaaaggcctctatctgggaaatctaatattgctttgctgacttgtttgtttttgattggactaggtctccacaccctggcaacctcctactgtgctcctgggtcattctcaagaggtcacgtctgtgtgctggtgtccatctgacttcacaaaggtttgtaaatgaatctctatagttggtttaaaatgtagatcacaggtttgtaggtttttctaaggtttgttttgagaatgatataaatttttatgtttaagttgagattttaaagacctaaaggccatccaggatctatattcacattactcaggcatattctgcttttctctacccataccataatggtattatgccctgtgaaataaggatagatttctggttccctacagttatttctttcctaaatgtaggattaagttgttaacttaattaaaattttctattaaaatctaagataaaaatacaatctaaggtgagaactagtcttttttactttttagatattatcaatgtagtatattaaaggtaacatcttgacagcccaatttgggttttcacatatggctaacaaaatggtaactgtgaagtcttaacatgttaggttatctattgcttaaactatgtaagtaggtctgaaatgttttagatactccagaaagaagacaatatgcccaccttttaatttttttatagtgacactttaagaaacaaaaaaaccctaaaatgtagaaaggccagaaacattaaaaactatgtatctattggaattgcatataatagtagctcaagttccagtcattctcccaaaccccattgcctctggtctttgagttattctgggttctacaggaaatcttatttctgtggaggtctcccctttcacgtatgacgttttgaggttttgttgcctattgttcccatctgttttttatcttccagaaacttctcatggtctggtctatttgtggcatccctgctagcttccagtattgctgtggatttctccttattgttaccatttctgtgctcaacttcatggcagaccttttctttttttttaagtcattactttaatcacccaaaattacatattaatgatattttttcctctgagattccatgtaatttcttttaacatggagggttgcatcttcatgggacttactaagttgaatgatttttgaattattcagttaattatgttatctttttttcaattgtcatatattatccttacccctatgcatctcaaacatcatatattaattatccttatttcctgtgctcaaaggaaatagcagggctgtttacctatactaatttattggctacttttttaagtcttaaaaataatttcatcccaagcctagaattaggaaagtaaaatatggtttgtgttgtttttgtgtttttaatgtctggcatttggaataggagaaagctgggtttaaattctagctcttccatttgattgtggttactttgggcaaataactttattcccattttgcatatgagattatttgagtacaaagcttttagagtgtgagaattaaataagataaagaatgtaaactaccagacacatagtaggtgctctgcaaataactattgttaataaactatagaagaactgtgagattccaaacatttcatattgaacagttaaatatgtgtatcttcttttggcctcccagtaaggaaaggaaaaagctgccagtctcttgggggccaagacttaagagaacatgtattctttttttctttctctttagtgactgaaatagagaaattatataaacaaatgctggggaacagctctggtaccagtggccatttgccacaagctcttcaagctggactttctctgccataaaaggcttgggaccaagatctagaatagtcagatatttttaaagggacaaaggttattttttaacttctttcagcctagggaacttgttgttttcccagattgctcctctacctatctgaaaaagaatctcaaaaggaatggtttccttctacttgtcacagcctactagagtcatgggccaagtctgatcttgcaaatggtgccattactttagcaatgtggcacaacatgcagaattcagaagaaagttgtagaaattgaatgttggtaacatatactgattgatcatttaacagaagagtaaaaagagtgtcttaactacatattttgtatttatacagaagatgataaagagccagaactttagattagataagaaatgaccagtaacaaaagacatactagtagaatgtatatgaagaataaactaaagagtcagctttgttggaaatctggaatgattcctgaaagcaagaaatggatgtacatgatctttaagatattattttctatatcctgtttattagacaaaataattatccagtcacaaggccttaagacacacctgttttttaatgtattttgaatcttgattgaaatttcttaattcccttcttggtactccctcttagattgctacctgttctgatgacaatacactaaaaatctggcgcttgaatagaggcttagaggagaaaccaggaggtgataaactttccacggtgggttgggcctctcagaagaaaaaagagtcaagacctggcctaggtaaggatatcatatactttccaagttttttatggtttgactagtttagtccgacagtacagagtaataagctagatttgatcttgctttggtatgtttttaaagaaaagcactatcttcttgccattcattctttttgataagtatttcccaagcactactatgtttatcatttacacaaggtactacagtggtggatttattcaacaaatatttcttgaacacccagtatgtgctgggccctgttcttagttgctagggattcagcaatgaacaaaagaataaaaaatcctgaagatgtaaatagagctaacatattagtgtgagaggcaataaacaagataaaaaagtaaaatatatactgtgtcaaataacaataagggcttaggaataaaggaaataggaaagggagaagggcaagggtgaaatatgctatcaaaattttatattaggtgaccaggggggcctcaatgaaaagatggcatttgagtaaagaaagtgaagtagtaagccatatagatattttaaagaagaatattccaggcagataaaagtacacaggccctaaagcaggagcatgcttggcatattttctcttcctcagagaggctagcatggctggcccctagggctgcagcaggcaaaggaaagggagggaatagtagtagaaaatgaaattctgtgagactttggcttttattttgatagacaaaagtccaccagagggtttggagcagaagagtatcataatttgacttttaacttgatcattcttgctcctgtgttgaggataaattgtaagggggtcagggtaaaagcaaaaagctacttttaaaaagccattgagataatccaggaagtgatgatggtgacttagaccagagtagtagcagaagctatggtgagaagtcatccaattttggatatatttacaagacagagccaacagaatatgttgagggatcagatgtggggctatatgggagagttatcaaggataacttcagagattttgcttaagaagctgaaaagatggagtgtcattaacctagataaatatccctgcaggaagagcaagtttgggagggaacagctggagttccatttggacatgttgtttgatatgattattaaacacccaaatggacatgtcagggaggcatttcgatgtttaattctgcagttcagggttgaagttgcagatgtgaggttcattatcacacagggtgaagatagctatagatagaaaaaaataggcctggtgtcttggggtaccccgatgtttagaggttgaggaggtgacaaataccattaaagcctactgagcagccacaaccagagaagtaagagaaaaactgggagagtgttacatcctggaagccaagtaaataagaggagagagggatgaacttgatttgatgtttctggtataccaaataaggtgaggcctaaaaactgaccaatggattaggcaatcataggggttatttggtgaccttaatgagtgttgttttggtggtatgatggtggcctgattggtgtcattcatgtatatgacttggggactacaagtatagacagttctttcaaggagttttgttataaaggaaagaagagaagtgaagtggtagctggagaaagaagcagggttgaagtttgctggggtttttttaaataggaatataacatttcacagtgattggcaggatcgtatagagagggggagattgatgcaggggaatttgctggagcaatgttaagcatgaggggatactatctgatacacagtaggagggtaggcctttgccaggaacatggatagttgacccatagtaattggagaaaaggtggaatatataagcatggtgcaggtaggctactgagagatggtggggagagaggtggagagatgagatggccataacttacagaagcttccttctgttctgatgttaaaacatgaatcagggttattaactgcgaatgaggataagggagaaagggagtagagattttagaagagataagaaagtctgaaattgtcactgagagaatagaggaataaatggacaggaaaatatgattgttgggcttcaagagtcaacttgaggctagcaataattaattgaaagtgagcactccacatggttgtgtgtttgctatgcaagtacaagtatactataggtagagagctagatttaaccagggatgtggtttagcaatgcaagtgaagaaggaagttgacagtggatgcaaagaggatgattatgactataagatataaccttggtaaggaggcatattagtccattttcacactgctgataaagacatgtacaagacttggcaatttacaaaagaaagaggtttaatgacttacagttccacatgactggaaaggcctcacaatcatggcagaaggcaaggaggagcaagtcacattttacatggatggcggcaggcaaagagagagattgggcagagaaactcccccttataatattgtcagatctcatgagacttatttgctgtcacgagaacagcatgggaaagacctgcccccattattcaattacctcccaccaggtccctcccacaacacatgggaattcaagatgagattcaggtggggacacagccaaaccatatcaggagggaagtaaggacataatggggccaagggatagtgtaaatgtggtactagcagtggattgaggataaaagattgttggaattgaaatactaaagggagatgggaaaataagtggtgatgagtgggatgattgaaattaagataatggaagatttccaggtattggtaataataaggtaaagaataagtggcttaggagagtgaaaggacaagattatagaagaaggaggtcaaaaaactgagaaaccaaggtattggaaagatcatgtacatagattttttaatcaccataaattgacagataatgttgaagagagtaacaatgaaccaagagcaaaaatcttcaagcaatgagccacccacagtgtggatcctcagggtatcattagatgtgctgtatacttgtacttacatggtaaacacacaaccttgtggaatgctcactttcaattaattactgctagcctcaagttgactcttactggccaacaatcatatttccctgtccatttactcttatattctctcagtgactgtttcaaactgtcttatctttaagcttgagttttaagcttaaagattcattttacttcagccatcaaggcctaaggttaatggggaattgaaggtgagaaagggaaaatatacaggttcatttttctaaggacttatttagttgcttataagatgcagaactagacttcagaggagtcttttgctctaagtctggtttctgtagtctttgatggtgctgccttatttgtttttgctctttgctttttttaatttctttttttcttttctttttttttttttgagacaaagtctcactcttgtcgctgagcctggagtgcagtggcatgatctcagctcacttattcaagcaattctcctgcctcagcctcctgagtagctggaattacaggcgtgtgccaccatgcccagctaatttttgtatttttagtagagatggggtttcaccatgttggtcaggctggtctcgaactcctgacctcaggtgatccacccgcctcagcctcccaaagtgctgggattacaggcgtgagccaccgtgcccagccctaaaaattttttttcattaatttagtattacagtttaataagtcagctagttctacaacagtgaataagataaatagcagtccacagaccctctgcctcatagtttccctttcccagaggcaacctctttcaaatccttttgctgattctttgatatgtatgtctagacctctaaatagttttgtgcatttctatttattttttgcaattttcagctttattaacttctttcctttgtaacatgaggatttaactccctttcctgtgtcccaccactatcaaaccttcatactcctcatcctcctaacacagggtcatgattttggttaaatcaagatacagctcagttccttttagtatgcagttgtccctcaggatccatgggggattggatccaggaacccccaacagataccaaagtccacagaagctcagattcattatctatgatgtagtatttgcctataacctatgtacattttcccatatacttttatcatctctagattacttaaaatacctggtacagtataaatggtatattaatagttgttgtactatatcatttagggaataatgacaggaaagaaaagtctgcacatgtttagtacagacacaaccatcttttttcgtgtttttgttttaatattttcaatttgtagtcaactgaatgcatggctgtggaacccagtatacagaactcaagatatagagagtcaactatatttagagttatgtagtcattaatacaatctaattctagaatatcttcaacacctaaaatgagggttccaatttctcttatgttcttgtcaacatttgttattgtccatctttttcattatacccatcctagcaggtgtgaattagtgtcccattgtggttttgatttatattttcctgatggccagtgatgctgaacatcttttcatgtgcttattggccatttatatattttccttggtgaaatgtctatgcagatcttctgcccatattctaattgggttatttgtctttttattgttgagttgtaagcattctttatatattctggacataagtcccttatcatgtaatgatttgcaatgatttattctgtgggttgtgtttttactttcttgatggtgtctcttgacacatgtaactttataattttgatgaagttcagtttatctgttttttcctttgtcacttatgcttttgatgttaaatcaaagaaactattgcctcttctgaggtaacaaggatttactccaatgctttcttctagttttttagtttaggcctgtgattcgttttgagtttatttttgtgttatggtgtgagttaggcattcaaattttttacatatggatatttaactttctcaccatcacttgttaaagagactattctttagcccattgaatcgtcatggcacccttggtaaaaatctgccaaaaatcaattgaccataaatgtgagggtttatttctgacttctcaattccattgatctatgtatctgtccttattatggttctgcattgtcttcattactgtagctttgtagtaggttttgaaatcctacttctgttttcttcttttatttcaagattgtctcgactgttctgggtctcttttatacaaattttagtttcagcttgtcattgtttgcaaaatagccagctaggattttgataggaattgcagtgactgtgtagatcagttatggaagtattgacatcgtaataatgttaaatcttctggtccatgaacttggatgtctttctattgcctgtcgttatatgtacttttctctctctcattttagaaaatataaaagaaaagaatcatatgaggccattagagaatactgattttaaaaaaaagtcatcagtattccctccactttgacataattttaaatgacatttccagttattttttgaggtttttcccttatacatagagattctttttaacagaaccatagttgtactgaatacgcatttgatttctctcaagccatcctaccacttcagcctcccaatagctgggactacaggcatgcaccaccacgcctggataatttttgtattttttgtagagatggggtttcgccatgttgcccaggctgggctcaactatgagctcaagcaatccacccacctcagtctcccaaagtgctgggattacaggcatgagccactgcacccagccttaagtactttctatgttatcttttttgcaacactatttcaaatactacacttgagtaaatgttccataatttacctagctattctactgtagtttaaacatttgtttcaaatattttaaaacttggggttttttcctccctgaatttagggtcccccttcccattaaaataagattcccaaaggtggaattcttgtgttaatgactataccatttcttaaaatttgtgatgaaaagtatcttgcttttaactatgtacttttagtgtgccattaattatccttagtattagaagccaagtcaccaaaaaagttacatattgaccaaatgtgagttgtaataataacaacgtttagccactattgactcctagcataattattctaaggacctacttggattatctcatttaattatgaaaacaactgaaactgaaggtcaaggaagttagacttgcttaaaatctcatagctatgaagttgtagaaccagagtctataattgaacccttgcagtctgattctagaacacatgctcagaaccactctgcagcactgccttctttagaacctaacagagcaggctgggtgcggtggctcacgcctgtaatcccagcactttgggaggccgagtgggtggatcacgaggtcaggagatcgagaccatcctggctaacatggtgaaaccccgtctctactaaaaatacaaaaaaaattagccgggcatggtggcacacgcctgtagtcccagctactcgggaggctgaggcaggagaatggcgtgaacccgggaggcggagcttgcagtgagtggagatcacgccactgcactccagcctgagcgacagatcaaaactctgtctcaaaaaaaaaaaagaacctagcagagcaaggcaaaagttcaggttaagatcagagtaagagttatgcctagattactccatttctgggtgatgctagggttactctgaagagcactacgaagcaacaacctgacacgggttttcaaaggctggcacactgaccattcgactctctaagccagcttccagccacagatttgctgcttctaatcacattgccatcttgaaaatcatgttcccctgctttcccaagcttctaattgccacgccaacctttcattgctgtcctgggctgcttatcttcacttctggccctggcttgtaaaccccctcagttaacacattaattggaagggtttaagtgctaagacatagcctctttttctcctgccctacctttcccagccggcacctgcttcattgcttaccactctttccctatgttttagccagagatctcatagcactgttgaaaccaatagtcctcaatcttggctatgcatcatagctacttggggagcttttcaagtccgtgtatccccagtgattgattcaatgggactggacctgtatttttacaaagctccaaggaggtctgttatgtagcgaggattgagaacctctggtttaggcattattgagtgataaagttgattatccttatcctaaagagaaggaaaccctacctattctgcctcagttgcttgctgcagtctcacaagtcagcaggataattatagagtcaattttctgatccctagaacctcacctgtatccttgtcagcagtaatgaaacttaacaaacattgtttaataattccttactacgcactataggggcactgggcctaaagatgagtaaaccattattagctgccctcgaggctcacagtctagtctaggaggcagattcaaaaactatagcacacagccattagctgtgtaaacaaggggctctgagaacctacttcccctgtgagaggagagctctgtgggagaagaggaaagaagttgtgaattcttcacagtggagttaacattgtcatcagagccttgaaacatgagaagaatttctgcctggcaaaggaggagctgacttggcaagaaaaccacatgaacaaagaaatgtgacagtacacagcttgttcaggaagcaactagtagtgtcctgtaacgtgatcctagaatagcaaagtacatgataagactgaaaaggcaggctgaggccagatggcaaactcatatagaaagaagctggctgggcacggtggctcacgcctgtaatcccaatactttgggaggccgaggcaggcgcatcacctgaggtcaggagttcgggactagtcttgccaacatggcaaaaccccatctctactaaaaatacaaaattagctaggcatggtggcacacgcctgtaatcccagctactcgggaggctgaggcaggagaattgtttgaatccaggaggcaaaggttgcagtgagccgagatcatgccactgcactccagcctgggcgacaagacaagactccgtctcaaaaaacaaagaaagaagctgcaaactgttagtagactctgtataattcttcgaaggaactgactttaggaagcatttagggcaataactcagtctatgctaccatgtcatcaaatctcatatattgcttaaggtcaataaggagttagtccacttaagtagatgaagtactaaagaaaatggcatgccatatttaaatgtgtaggcccatataatggcatgctatgcacctgttaaaaataatgcaatgcatctatgtgtacttacatgaagagacgtaaaaataaaagagcaaatggcagaacatgtacagatatatatatagtataatccatttgtattttggggttttttaaggtctgatacatatatacctttgtatgtgctaaataggcacagagaaaattgcggaatgcacaagaatgtaaaagtgaaatgaaaaagttgaaaagaggatcctgtttccaccctcttcccctctgtactggttgaatttttttaccattaactttcatactgttataatgtagttactgtttaaaaaacatatacacacacttaaatttgacccagcatttgctaaccttcaaagctaacaaaatttctttgacccccatggaccacttcctctttcaccatgacatcctgaaggaagaggaaatgccccaactttccaacacatcaatttcataccagccttatcagtaaatactccagtgtgtgccatgcaagtttcagaaacctagatacctggtttgtccctgtcccagctcttccttcttccccaatcctgccttgttaatcggcatattataggactcataaaattttaggactttctgccctaaatgtacactttgacccacttaaatggaacagatgactgtggcagctgtgcagtgactattaacctgcaccgaggagtgcagcaaatgaaaacttccttttctgctgaaaaaaatagctgttatcaagctctagagcgttagtgtgagaaccataaccagaggtttcatgaataggtccctgttactaagtccttttcatggcatcttatgacaaaatggggtttttcagtaattatccttattaaaagagcagtatcattttggctggttctaaacatatggttgatgagaaaagtttaggcaaaagtcaatttgtagaatttctctctctcaaggcaagactgctttaggagtgaaaaacacagggtaaaaaaaggacaggataattaactgactaaagtgagtacttgccaatctttatttatgctaaaagagagattgcatttttatatcagcccatcctaaattcagctggatataaatgcaattaggtaattaaactgaattaaaaattatagttaacaattcaaaggctttgtgactgagaataaataaatacccttgttatttgaagacaggaatgctatttcagcaatctagaaagctcagaaggaaattgagaaagtgttgtctgtggtagggcccgagagggaagaagcatgaagttcataaaaatttgcctgaagtacttgccattgtatgtaaacaaagggacaggtacacatacagaagtcctatttactaagtttgatttgatttacagagagcaagcactgagattctgaatgttttttgccttgtggaaaatagtagtcatttgtaaaataaagtgggaagccatgtgaggcctgataaccttaacaaataattgattgaatggcttcttgtgaaaagaaaaactatctcctttaacagatatagaatctgagtccaaagagataaagggttatgcccaagtcacatagtaagtgattgtgccaggttttagatctgtgcattcctgtttgagagcccctgtgcagtgcctttctgccctagcattgctcaacagtttatataagaatgctaatggcagcgttaaatgtgttgtagaatacctataccttagaatacattgtagctattaaaaatgataaatctgtattaatgtgggaaatgttcacaatatattaagaagcaggttattcctaattttaaaatggacaaagggcctgaatagacatttctcaaaagaagacatacaaatgcccaacaggtatatgaaaaactgctcagcatcaccaatcatcagggaaatgtaaatcaaaaccacaatgagatatcccctcacacctgttaggatagcttttatcaaaaagacaaaatgtaacaagtattggtaaggatgtggagaaaagggaacccttgtacactggtgggaatgtaaattagtatagccattaaggaaaacagaatggcagtttctcaaaaaattgaaaatagaactaccatatgatccagcaatttcacttttgggtatatatcaaaaaaagtgatcgcagtatgtggaagcgatacctgcactccaatgttcactgcagcactattcacgatagccaagatatggaatcacctaagtattcatcagataaagacaatatgatgtatatacacaatggactactattcagccttgaaaaagaagaaagttaatgtcatttgcaacaacagggatgaacctgaaagacattatgctaggagaaataagccagacagagaaagacaaatactgcatgatctcacttgtggaatcttaaaaagttgaactcataggagcagagagtagaataacgtactatgtacttgaaaattgctgagtagattttaaatgttcttaccacaaaaatatatgaagtgatgttagttggcttgatttaatcattctacaatgtatgcatgtatcaaaacatcacattatagcctatatacacaataaaaataaatttgcttgagataaaatattacgaaatagtatatatatagtgatctctccttttttaaaaaatttcaatagttttgggggaaccagtgatgtttgattacatggataggtactttagtggtgatttctgaaatttggtgcacccatcacccaagtggtgtacgctgtaaccaatgtgtagtcttttatcccttacctccctcccaccttgagtccccaaagtccattgtatcattcttatgcctttgcgtcctcatagcttagctcccacttataagtgagaacatacgatgtttggttccattcttgagctacttcacttagaataatggtctccaggccaggcgcagtggctcatgcctgtaatcctagcactttgggaggccaaggcaggtggatcacctgaggtcaggaattcaagaccagcctggccaacatagtaaaacccccctctactaaaaatacaaaacttaggtgtggtggtgcatgcctgtagtcccagctacttgggaggctgagtcaggagaattgcttgaacctgggagatggaggttgaggttgtagcaagccaagatcgtgccactgcactccagcctgggtgacagagcgagactccgtctaaaaaaaaaaaaagataatggtctccaactccatcctggttcctgcaaatgccattatttcaattccattttatggctaagtagtattccctggtatatatatacaccacgttttctttatccacttgttgattgaagggcatttgggctggttccacatttttgcagttgcaaattatgttgctataaacatgcatgggcaagtgtttttttcatataataactttttttcctctgggtagatacccagtagtgggattgctggatcaaatggtagatctacttttagttctttacagaatctctgtactgttttccatagtggttgtactagtttacattcccaccagcagtgtaaaagtgttccctttccaccacatccaccccaatgatggccattcttgcaggagtaaggtggtattgcattgtggtttttatttacatttccctgattattagtgatgttgagcattttttcataagtttgatggccctgtgtatatcttttttttgagaattgtctattcatgtccttagcccactttttgatgggattatttggttttttttccttgctgattttaaaactggaaaagttcccttgtcccccttgcagggcgtgcgatgagggtgtggcttccttcttcaatgccccggtgctcagacctctacgggagcatacagatgggcaggctgtagggctccgaccccacagcagtgtctgggggtgaatgtttatagctcctgaagccccagtgggcgtgtgttacagtgtgctcttttagttttgctgtctataggcggcttgtgttaaccagctctattagacccctgccttatcgcaaggacagagggctttctgtatcccggggttcttgccttggtgtaccagaagactcggatcacatgtgggcttggagaatttgagtgcaaggttccactgagcagaagtagctttccgcggatgggggagccagaagggaaatggctttcccctggagttgggcccttggcggccccagttctcctccgactgccccgaccaaactgcatcattccaccggttgatgccctgctggcctgccggcctgcctatgcctgtcagtgtgctcttctgccagcgtgcttctcaacgtctgcttgacgaccagccacttgtgtctttctctgcccatgtgttcctcacaacatccagccaccatgtgttcctgctagggtcttgggggtttttataggcacaggatgggggcgtggcaggccaaggtggtcttgggaaatgcaacatttgggcaggaaatgcctgtcctcacctaggtctgtggggatggagccctagccagggatcacaccttcttctgcccaacacttcccttcccccattccgtatcatttaaagggaccatgctcttcccttcccagcactcccgtatcaatttttttgagttccttgtagattctggataatagtcctttgttggttgcatagattgtgaagactttctcccactctgtgggttctttgtttactttgctgattatttcttttgctgtgcagaagctttttcgtttaattaagtcccatctatttatctttgtttttcttgcatttgcttttgggttctttgtcatgaactctttgcctaggccatgtctagatgagtttttcccatgttatcttctagagtttttatggtttcaggtcttagatgtaagtctttggtccatctggagttgatttttgtataaggtgagagatgaggatccagtttcattctcctacatgaggcttgccagttatcccagcaccatgtgttgaatagggtgtcctttccccacctcatgtttttgtttgctttgttgaagattatttgtctgtaagtatttagttttatttctgggttctctgttctattgcattggtctatgtgcctatttttatacgagtaccgtgctatttgagtgactatagccttgtagtgtagtttgaagtcaggtaatgtgatgcctgcagatttgttctttttgcttagtcttgctttggctatgtgggctgttttttggttccatatgacttttcagattgttttttctagttctgtgaagaacgatgatggtattttgatgggaattgcattgaatttgtagattgcttttagcagtatagttattttcacagcattgattctacccatccttgagcgtaggttgtgtttttccatttgtttgtgtcatctgatttcttttagcagtgttttgtagttttccttgtagaggtcttttacttccttagttaggtatattcctaggttttgcagctattgtaaaaggggttgagttgttgatttgatttgcagcttgtttgctgttgctgtatagcagtactactgatttatgtacattgattttgtatcctgaaacctaacagaattcatttatcagatctaggagctttttggatgagtttttagggttttctaggtatacaatcatatcatttactaacagtgacaggttgacttcctctttaccaatttggatgccttttaatttctcttttctgactgactgtggctggctagggcttccactactatgttgaatagaagtggtgaaagtgggcatccttgtctttttccagttctcatggggaatgctttcaacttttccccgttcagtataacgttggctgtgggtttgtcatggatggcttttattaccttcaagtatgttccttctatgctgattttgctgagtgttttcatcataaagggatgctggattttgtcagacgttttttctgcttctattgaagtgatcatgtgttttcgtttgtttttctcttagagtttcgctcttgttgcccaggctggggtgcagtggtaccatctcagctcactgcaacctccaccacccaggttcaagggattctcctgcctcagcctcccaagtagctgagataccacatctggctaatttttgtatttttagatggggtttcaccatgttggccaggctggtctcaaactcctgacctcaagtgatctgccctcctcggcctcccaaagtgctgggattacaggcatgagccaccgcacccggcctgatttttgtttttaattctgtttatatggtgtatcacatgtattgacttgtgtatattaaactttccctgcatccctggtttgaaatccatttgatcatggtagattatctttttgatatactgttggatttggttagctagtattttgttgaggatttttgcatctatgttcatcagggatattggtctgtagttttcttttttgtcatgtcctttcctggttttggtattagagtgatactggcttcataggatgatttagggagtattccctctttctcttttggaatggtttcagtaagattggtaccagttcttctttgaatgtctgatagaattcagcagtgaatccatctggtcctggactttttcttcttggcaatttttttattaccatttcaatctaagtgcttgttattggtctgttcagagttcttatttcttcctggtttaatctaggaggttgtatatttccaggaatttatccatctcctctaggttttctagtttgtgagcacaaatgtgttcatagtagccttgaatgatcttttgtatttctgtggtattcgttgttaatatttcctgtttcatttctaattgaacttatttggatcttctctcttcttttcttggttaatctcactaatgggctatcaattttgtttatcttttcaaagaaccagctttttgtttcatttatcttttgtattttgttgttgttgtttcatttttattaagttctactctggtctttgttatatctttcctcctcctgggtttgggtttggtttgttcttatttctctagttcttgaggtgtgaccttagattgtcaatttgtgctctttcagactttttgatgtaggcacttaatgctgtgaactttcctcttagcactgcttttgctgtatcttagaggttttgttaggttgtgtcacttttttcattcagttcaaagaatttttttaatttccagcttgattttgatttcattattgacccaaagatcattcaggagcggattatttaatgttgcatggttctaagaattccctttggagttgacttccaattttattccactatggtctgagagagtacttgatataattttgattttcttaaatttattgagacttgttttgtggcctatcatatggtctctatcttggagaatgttccatgaatgttctgatgaatagaatgtatattctgcagttgttgggtagaatgttctgtaaatacctgttaagtccatttgttctagggtataagtccattgtttctatgttgacttactgtattgaagtcccccactatgagatgagattctatttttgtgtatttcaaggttttgctctaagatttagaactccttttagcagtttttgtaaactatgctggcttggtagtggcaaattctctcagcgtttgaaaaagactttcatcttttcttcatttatgaagcttagtttcactggatacaaaattcttggctgataattattttgtcagctaataattatttaataaggctaaagataagacctttatcccctctagcttgtagagtatctgctgttaatctgataggtttttcctttacaggttacctgatgcttttgcctcccagctcttaagattttttccttcatcttgactttagatagcctgatgactgtgtgtctaggtgatgatctttttgtgatgaatttcctgggtgttctttgagcttcttgtatttggatgtctagatctcgagcaaggccagagaagtttttattcttttgcctttgtctttgttgaattgggttaattcaagagccttgtctttgagctccaaaattctttcttctacttgtttggttctattgttaaaactttccagtgtattttgcatttctctaaatgtgtctttcatttccagaagtcatgattgttttttatttatgatatctatttctctggagatttttttcgtctacatcctgttttgttttatttttaaatttaagttggttttcatctttctctggtgcttccttgagtagcttaataattgaccttctaaattcttttctggcaattcaaagatttattattggtttggatccattgctggtaagctagtataatcttttaggggtggttatagaaccttgttttgtcatattacctgaattgtttttctggttccttctcgtttgggtggactatgtcagaagaaagatctgggactcaatgtgtgctgtttaaattcttttgtcccacagagtgatcccttggtgtggtgctctcccccttccctaggggtggggctttctgagagctggactgcagtgattgttattgctcttctgggtcgagccacccagcagagctactgggttctaggctggtactggagagtgtctgctaagagtcctgtgatgtgatctgtcttcaggtctgtatgccatggatactagcacctgctctaatggaggtggtaggaaaggagtgaagtggactgtgtgagagtacttggttgtagttttatttagtgtactggttgtcttgaatgctagttatactagcactgaagttattacatggacagactcaggacctctctggttggccaagatgttacaggcagtagaattagctgttattttctgctttcttggagcagggttgttctgttgaattgctgtaatggcttgaattggttggcctccagccaggaggtggcactttcaagagagtatcaactgcagtagtatagcgggggatataagcttgccttacggtttcctggataggttttcgggcttctcaggcaatgagcagggccccacgagtttttgtcttttgtttacggctaccagggcggttagagaaagaccatctggtgggggcagggatagtgtgtctgagctcagactccttgggcagggcttgctgtggcctctgggcgatgggagtggtggttaacaggccaatggagttacgttctaagggagattatggctgcctctgctgcttcatacacatcaccagggaaataggggaaagccggcagtgacagaccacagccagcaaggccagtctcactcctgcagtgcttccccaacagccaacagaaccaaatttatatccatgcctccagtgcacagggtggagatcttgccctagactacaaaactccccgccgagaaagcaagcagggctgttaggccttgtccatctgcctgccacagcttctgtgctcatatctgcacttcctatttgtcccatccccctgcagattctgcccaggaaaattcacgctcagttgaaatcattacaaagttcagctgaaagtctccttctccctatggtccttccccaattccattggctgccctctccaaagacccctgtgagatagtcagaaatggtttccctggggaccaggagtgcctacagggctcttcctgctgctgcttctacttttatattttgtttggctctctaaattcatttcagttctccttctcccatgatctggatcctcagtgaggatgtgtgcagaagtggactttacccctctcacactgttttttgtttgtttgtttgtttgtttgtttgttttgaaacggagtctcgctgtcaggcaggctggagtgcagtgcatgcgatcttggctcactgcaacttccacctcccaggttcaagcaactcttctgcctcagcctcctgagtagctgggactacaggtgcacaccaccatgcctggctaatttttgtatttttagtagagacagggtttcaccatgttggccaggctagtgttgaactcctgacctcaagtgatccacccacctcggcctcccatagtgctgggattacaggcatgagccaccacacccagccaccctctcacactttggaccttgagagcttgtttggaggttctagcaggggagcacatttactcgtatacccttgactgaagaccgattctcctcttatcaggaatggttgtcctcttcgaccaagcacacagcttcgggagccctctcacactttgggcactcaatttttctgctgtcttgtggattttgcagcagcaagccacttctttcaaaggatctgttaattcttttgttttttctggtatgttcctgtgatagttcttggagccaaagttcactatgtgagtctccacatgctgttctgtctgtctgagtggcaaattagtcctgcctcctatctgccactttccccttaaatcagtctcatttttgtaaagaaaaaagttgagatgtatagtatgtatcacatgcacaaatatagaaagtatgctaaacatggtttacgtaagtgctttaaattttttctctttatgtttttcggtattttgtcgatttttacaagtatatattttataatgggatagttgggaggttggtgacttggaaaagagaaaggaaaatgataaaagggtgtggttggaatcaagtgatgtatacctacttactggcaaattgacccttagatgattaggttagctatgatttttcttgatgagaatttagggactttgtatggctttcacttctgatcttcatgatcctctcctctttttcagtaacagtaacgagtagccagagtactcctgccaaagcccccagggcaaagtgcaatccatccaattcttccccgtcatccgcagcttgtgccccaagctgtgctggagacctccctcttccttcaaatactcctacgttctctattaaaacctctcctgccaaggcccggtctcccatcaacagaagaggctctgtctcctccgtctctcccaagccaccttcatctttcaagatgtcgattagaaactgggtgacccgaacaccttcctcatcaccacccatcactccacctgcttcggagaccaagatcatgtctccgagaaaagcccttattcctgtgagccagaagtcatcccaagcagaggcttgctctgagtctagaaatagagtaaagaggaggctagactcaagctgtctggagagtgtgaaacaaaagtgtgtgaagagttgtaactgtgtgactgagcttgatggccaagttgaaaatcttcatttggatctgtgctgccttgctggtaaccaggaagaccttagtaaggactctctaggtcctaccaaatcaagcaaaattgaaggagctggtaccagtatctcagagcctccgtctcctatcagtccgtatgcttcagaaagctgtggaacgctacctcttcctttgagaccttgtggagaagggtctgaaatggtaggcaaagagaatagttccccagagaataaaaactggttgttggccatggcagccaaacggaaggctgagaatccatctccacgaagtccgtcatcccagacacccaattccaggagacagagcggaaagaaattgccaagcccggtaagtcagcagtggtgggaagatacatttcctaacttaaaaggggccagacacccagatgtctcaagtcaggatgcttttttttttttttaaagaaagaaatctatttattcctagtgctgccaaattcagcacataaatacaaaacaaattttgcatgggccatatttttagtaaaaatgttttatgctaagaaactatttttgtttgtctgaaattcaaatgtaactgaatgtgctgtattttatctggcaactctacttactcccattaaaatccctcctgtcagggtccatactcctcagccctgttgcctgattgaccaaagccttcatcatgctccaggatatcaattcaaaaatatctcccctctcctgttagacagtatgccatcctctttttatagataaagctgttgttcatgggaaagttgccaacatccataagtagatttccagtttgtaattccattttgtgattatttaaaatacagtgaaacttagatacttacaaaacaatttgagtgcaaaatctttctagatttttatgacttctccacaatcttttataatcattttgccacaccacagtaatacttttgacacctatatctattctttttaacattcagtgtagtgtcacttatctttttaggactcatttcattgactgacttaatatttaaattagataatatcagtcatcagtgattgatggcagaaataggtttgtgaaccttgaaaaacaagattcattacagtggtggaggcagaagtagctgagtgcattgggtgagctatgggcaccagtcagagagaataaaaagcttctgttgtttgcatgtgaaggggagatgggttaaggaagtttccactgtacttcacagtagctcttgtggtggcgggatgattgaaatagaatccagaatcatgatcagcatcatctgccattttaaagggcagaagctagataaccaaccttaggccagttttagtttaaaaagtgttcataaccccgacctgctctcatgaagacctatcccataattttagaaaaataaactgatagattttaaagacaacttagtacacaaactgcaatcaagaccttgctgtagaaagtggagaaaaaagacagttataaggaatctttccttctctcaaaattatgactgctctttatccctagccaaaatttctattttttttttcaagggagctggtctcagctatgtgttagcagaaaagtagtttcaatgaaaaactattttcactgatacataaatcttaaaatctttaaaaagtagaaacagtgtgctggtcttgtaatttatttgaagctaacatttcttaaaaattttttacctttatatgatgataatgtcaaccttcagaagagagtaacatcttccatttgaatacctatcttgtttataaattgggggggctgatttattcatttatttcaaaaaggatagtaattgtaacttatttgtttcttattaggagacttagctagtaaatgttttctattcacataagaagtctatgccttctttccctacatatcatctgttaagtttttactatagtcagtacaaatcagccaaaagagacattgccattgaaagtatttggagctgaaagcaggctaaacaatgaaatttctggcagcctaatttaaggtatgccttagtaataacttagtaacagttgaacttcaaggaaatctctgaaatctaaactttcttcttctaggtcaccatcacgcccagctccatgaggaaaatctgcacatacttccatagaaagtcccaggaggacttctgtggtcctgaacactcaacagaattatagattctaatctgagtgagttactgagctttggtccactaaaacaagctgagctttggtccactaaaacaagatgaaaaatacaagagtgactctataactctggtctttaagaaagctgccttttcatttttagacaaaatcttttcaacgctgaaatgtacctaatctggttctactaccataatgtatatgcagcttcccgaggatgaatgctgtgtttaaatttcataaagtaaatttgtcactctagcattttgaatgaatagtcttcactttttaaattattcatcttctctataataatgacatcccagttcatggaggcaaaaaacaagtttcttgttatcctgaaactttctatgctcagtggaaagtatctgccagccacagcatgaggcctgtgaaggctgactgagaaatcctctgctgaagacccctggttctgttctgcctccaacatgtataattttatttgaaatacataatcttttcactatgcttttgtggggttttttttaagtatgtgtaaaaatgtgatgctcagataagtacatttatatcagttcagtgttaaaatgcagtctcttgagttaaagtcatctttattttaaatgcagtgataaatgtcaactcttcggagaaactaggagaacaacaacagaaagctgtgtttgtcttttttctctcaaatatatctcccgtatgagatttcaggtccccatgttttcaccaagcaatctgctatgtcagccaacccaacatcactttctacaggaggttatgatttttgccatttactagaggaagatgttttatgaaatcaatttggggtttgaattcaggtgcagtcatcagttctttaggggctgcaatgttttaaaaaaaataagtcatcagattttaagaaaaaagtgatgatttcttattgatatttttgtaacagaatatagctcttaactgaaaatccagaaccagaaacataaatcttgagtttcttttcatgtacataaaaagcaatagccttttagtatagatagccctgagccaaaaagtaatagaattttctctagatatttaatacagagagtgtatagactgactctaagttaataatgtgcaaaatatcttaaacatccctccccttattcaacaattatgtatcagtgatcttgaaccattgttttatatttttcacctttgtaacctcatggaaagaggctttacatactttctatgtactatttacttagaagggagcccccttccagtcatgaaacttcatttgttttatccatatccctgaggactgtgtagactttatgtcagtttttgtcattatttgaaaatctattctgacaactttttaattcctttgatcttataagttaaagctgtaacaactgaaattgcatggatcaagtaagcatagttttatccagggagaaaaataaaaggaagccatagaattgctctggtcaaaaccaagcacaccatagccttaactgaatatttaggaaatctgcctaatctgcttatatttggtgtttgttttttgactgttgggctttgggaagatgttatttatgaccaatatctgccagtaacgctgtttatctcacttgctttgaaagccaatgggggaaaaaaatccatgaaaaaaaaaagattgataaagtagatgattttgtttgtatccctacccatctcctggcagccctactgagtgaaattgggatacatttggctgtcagaaattataccgagtctactgggtataacatgtctcacttggaaagctagtacttttaaatgggtgccaaaggtcaactgtaatgagataattatccctgcctgtgtccatgtcagactttgagctgatcctgaataataaagccttttacctt

SEQ ID NO: 6 - DNA, 60 bp, Artificial Sequence
  Probe for SEQ ID NO: 1 (FLJ20354)
  misc_binding (1)..(60): Probe for FLJ20354 (SEQ ID NO: 1) mRNA
catcaggaaattcttcaagtaccctcttacttacagactgcagtggaaaaacatcttgac

SEQ ID NO: 7 - DNA, 60 bp, Artificial Sequence
  Probe for IMAGE:4081483 (SEQ ID NO: 2) transcription product
  misc_binding (1)..(60): Probe for SEQ ID NO: 2 mRNA
atttatgccttgaagggtgagactattgaaggagccttatgcaaggatggccgttttcgg

SEQ ID NO: 8 - DNA, 60 bp, Artificial Sequence
  Probe for SEQ ID NO: 3 (UBE2R2) transcription product
  misc_binding (1)..(60): Probe for SEQ ID NO: 3 mRNA
tgaaatccctgcaggaggaaccggtggagggcttccggatcaccctggtggacgagtccg

SEQ ID NO: 9 - DNA, 60 bp, Artificial Sequence
  Probe for SEQ ID NO: 4 (ZNF533) transcription product
  misc_binding (1)..(60): Probe for SEQ ID NO: 4 mRNA
ggcaagagttatcatagaacaacaaaatagagtggactcttttagagcatctatatctgc

SEQ ID NO: 10 - DNA, 60 bp, Artificial Sequence
  Probe for SEQ ID NO: 5 (DTL) transcription product
  misc_binding (1)..(60): Probe for SEQ ID NO: 5 (DTL) mRNA
catttggctgtcagaaattataccgagtctactgggtataacatgtctcacttggaaagc

1. An array comprising polynucleotide probes capable of hybridizing to transcription products of the genes defined in SEQ ID NO: 1, SEQ ID NO: 2, SEQ ID NO: 3, SEQ ID NO: 4, and SEQ ID NO: 5 derived from a breast cancer cell, said array embodying polynucleotide probes being able to determine the expression level for said genes, wherein the expression level is normalized against 10-100 control genes based on polynucleotide control probes in the array that are capable of hybridizing to the control genes.

2. The array of claim 1, wherein said gene expression level is determined through hybridization of the transcription products of the genes defined in SEQ ID NO: 1, SEQ ID NO: 2, SEQ ID NO: 3, SEQ ID NO: 4, and SEQ ID NO: 5 with the polynucleotide probes defined in SEQ ID NO: 6, SEQ ID NO: 7, SEQ ID NO: 8, SEQ ID NO: 9, and SEQ ID NO: 10.

3. A method of predicting an increase risk of metastasis of a subject having breast cancer by establishing an over expression of the genes defined in SEQ ID NO: 1, SEQ ID NO: 2, SEQ ID NO: 3, SEQ ID NO: 4, and SEQ ID NO: 5, said method comprising assaying for the expression levels of said genes in a breast cancer cell from said subject.

4. The method of claim 3, wherein said assaying comprises preparing RNA from said sample and probing this RNA with polynucleotide probes being able to determine the expression level for said genes.

5. The method of claim 4, wherein said RNA is used for quantitative PCR.

6. The method of claim 3, wherein said assaying involves the polynucleotide probes defined in SEQ ID NO: 6, SEQ ID NO: 7, SEQ ID NO: 8, SEQ ID NO: 9, and SEQ ID NO: 10.

7. The method of claim 3, wherein said sample is a ductal lavage or fine needle aspiration sample.

8. The method of claim 7, wherein said sample is microdissected to isolate one or more cells suspected of being breast cancer cells.

9. The method of claim 8, wherein said assaying comprises preparing RNA from said cell and optionally using said RNA for quantitative PCR.

10. A method to determine therapeutic treatment for a breast cancer patient based upon said patient's expected survival, said method comprising determining a survival outcome for said patient by assaying a sample of breast cancer cells from said patient for the expression levels of the genes defined in SEQ ID NO: 1, SEQ ID NO: 2, SEQ ID NO: 3, SEQ ID NO: 4, and SEQ ID NO: 5; and selecting the appropriate treatment for a patient with such a survival outcome.

11. The method of claim 10, wherein said assaying comprises preparing RNA from said cells.

12. The method of claim 11, wherein said RNA is used for quantitative PCR.

13. The method of claim 12, wherein said assaying involves the polynucleotide probes defined in SEQ ID NO: 6, SEQ ID NO: 7, SEQ ID NO: 8, SEQ ID NO: 9, and SEQ ID NO: 10.

14. The method of claim 10, wherein said sample is a ductal lavage or fine needle aspiration sample.

15. The method of claim 14, wherein said sample is microdissected to isolate one or more cells suspected of being breast cancer cells.
